(19) United States
(12) Patent Application Publication
(10) Pub. No.: US 2014/0352004 A1
(43) Pub. Date: Nov. 27, 2014

(54) PLANTS HAVING EHANCED YIELD-RELATED TRAITS AND A METHOD FOR MAKING THE SAME

(71) Applicant: BASF Plant Science Company GmbH, Ludwingshafen (DE)

(72) Inventors: Wim Van Camp, Sint-Denijs-Westrem (BE); Steven Vandenabeele, Oudenaarde (BE); Marieke Louwers, Gent (BE); Jerome Matin, Gent (BE)

(73) Assignee: BASF Plant Science Company GmbH, Ludwigshafen (DE)

(21) Appl. No.: 14/357,678

(22) PCT Filed: Nov. 12, 2012
(86) PCT No.: PCT/IB2012/056346

§ 371 Date: May 13, 2014

Related U.S. Application Data
(60) Provisional application No. 61/559,202, filed on Nov. 14, 2011.

(30) Foreign Application Priority Data
Nov. 14, 2011 (EP) 11189031.5

(51) Int. Cl. C12N 15/82

(52) U.S. Cl. CPC C12N 15/8261
USPC 800/290; 435/419; 435/320.1; 800/298; 800/320; 800/320.3; 800/320.1; 800/320.2

(57) ABSTRACT

A method for enhancing yield-related traits in plants by modulating expression in a plant of a nucleic acid encoding a GRP (Growth Related Protein) polypeptide is provided. Plants having modulated expression of a nucleic acid encoding a GRP polypeptide, which plants have enhanced yield-related traits relative to control plants, and constructs comprising the GRP-encoding nucleic acid, useful in performing the methods for enhancing yield-related traits in plants are also provided.

### BACKGROUND

[0001] The present invention relates generally to the field of molecular biology and concerns a method for enhancing yield-related traits in plants by modulating expression in a plant of a nucleic acid encoding a GRP (Growth Related Protein) polypeptide. The present invention also concerns plants having modulated expression of a nucleic acid encoding a GRP polypeptide, which plants have enhanced yield-related traits relative to corresponding wild type plants or other control plants. The invention also provides constructs useful in the methods of the invention.

[0002] The ever-increasing world population and the dwindling supply of arable land available for agriculture fuels research towards increasing the efficiency of agriculture. Conventional means for crop and horticultural improvements utilise selective breeding techniques to identify plants having desirable characteristics. However, such selective breeding techniques have several drawbacks, namely that these techniques are typically labour intensive and result in plants that often contain heterogeneous genetic components that may not always result in the desirable trait being passed on from parent plants. Advances in molecular biology have allowed mankind to modify the germplasm of animals and plants. Genetic engineering of plants entails the isolation and manipulation of genetic material (typically in the form of DNA or RNA) and the subsequent introduction of that genetic material into a plant. Such technology has the capacity to deliver crops or plants having various improved economic, agronomic or horticultural traits.

[0003] A trait of particular economic interest is increased yield. Yield is normally defined as the measurable produce of economic value from a crop. This may be defined in terms of quantity and/or quality. Yield is directly dependent on several factors, for example, the number and size of the organs, plant architecture (for example, the number of branches), seed production, leaf senescence and more. Root development, nutrient uptake, stress tolerance and early vigour may also be important factors in determining yield. Optimizing the abovementioned factors may therefore contribute to increasing crop yield.

[0004] Seed yield is a particularly important trait, since the seeds of many plants are important for human and animal nutrition. Crops such as corn, rice, wheat, canola and soybean account for over half the total human caloric intake, whether through direct consumption of the seeds themselves or through consumption of meat products raised on processed seeds. They are also a source of sugars, oils and many kinds of metabolites used in industrial processes. Seeds contain an embryo (the source of new shoots and roots) and an endosperm (the source of nutrients for embryo growth during germination and during early growth of seedlings). The development of a seed involves many genes, and requires the transfer of metabolites from the roots, leaves and stems into the growing seed. The endosperm, in particular, assimilates the metabolic precursors of carbohydrates, oils and proteins and synthesizes them into storage macromolecules to fill out the grain.

[0005] Another important trait for many crops is early vigour. Improving early vigour is an important objective of modern rice breeding programs in both temperate and tropical rice cultivars. Long roots are important for proper soil anchorage in water-seeded rice. Where rice is sown directly into flooded fields, and where plants must emerge rapidly through water, longer shoots are associated with vigour. Where drill-seeding is practiced, longer mesocotyls and coleoptiles are important for good seedling emergence. The ability to engineer early vigour into plants would be of great importance in agriculture. For example, poor early vigour has been a limitation to the introduction of maize (Zea mays L.) hybrids based on Corn Belt germplasm in the European Atlantic.

[0006] A further important trait is that of improved abiotic stress tolerance. Abiotic stress is a primary cause of crop loss worldwide, reducing average yields for most major crop plants by more than 50% (Wang et al., Planta 218, 1-14, 2003). Abiotic stresses may be caused by drought, salinity, extremes of temperature, chemical toxicity and oxidative stress. The ability to improve plant tolerance to abiotic stress would be of great economic advantage to farmers worldwide and would allow for the cultivation of crops during adverse conditions and in territories where cultivation of crops may not otherwise be possible.

[0007] Crop yield may therefore be increased by optimising one of the above-mentioned factors.

[0008] Depending on the end use, the modification of certain yield traits may be favoured over others. For example for applications such as forage or wood production, or bio-fuel resource, an increase in the vegetative parts of a plant may be desirable, and for applications such as flour, starch or oil production, an increase in seed parameters may be particularly desirable. Even amongst the seed parameters, some may be favoured over others, depending on the application. Various mechanisms may contribute to increasing seed yield, whether that is in the form of increased seed size or increased seed number.

[0009] It has now been found that various yield-related traits may be improved in plants by modulating expression in a plant of a nucleic acid encoding a GRP (Growth Related Protein) polypeptide in a plant.

### DETAILED DESCRIPTION OF THE INVENTION

[0010] The present invention shows that modulating expression in a plant of a nucleic acid encoding a GRP polypeptide gives plants having enhanced yield-related traits relative to control plants.

[0011] According to a first embodiment, the present invention provides a method for enhancing yield-related traits in plants relative to control plants, comprising modulating expression in a plant of a nucleic acid encoding a GRP polypeptide and optionally selecting for plants having enhanced yield-related traits. According to another embodiment, the present invention provides a method for producing plants having enhanced yield-related traits relative to control plants, wherein said method comprises the steps of modulating expression in said plant of a nucleic acid encoding a GRP polypeptide as described herein and optionally selecting for plants having enhanced yield-related traits.

[0012] In one embodiment, the preferred method for modulating expression of a nucleic acid encoding a GRP polypeptide is increasing expression by introducing and expressing in a plant a nucleic acid encoding a GRP polypeptide, preferably a recombinant nucleic acid encoding a GRP polypeptide. In another embodiment, the preferred method of modulating expression is by introducing a genetic construct designed for decreasing expression of a nucleic acid encoding a GRP.

[0013] Any reference hereinafter to a “protein useful in the methods of the invention” is taken to mean a GRP polypeptide as defined herein. Any reference hereinafter to a “nucleic acid useful in the methods of the invention” is taken to mean a nucleic acid capable of encoding such a GRP polypeptide. The nucleic acid to be introduced into a plant (and therefore useful in performing the methods of the invention) is any nucleic acid encoding the type of protein which will now be described, hereafter also named “GRP nucleic acid” or “GRP gene”.

[0014] A “GRP polypeptide” as defined herein refers to a polypeptide selected from Table A in the Examples section, and to homologues and derivatives thereof.

[0015] In a particular embodiment, preferred GRP proteins for use in the methods of the invention include Zeama_GRMZM2G180172, Zeama_GRMZM2G012224_T01, Zeama_GRMZM2G055585, Zeama_GRMZM2G049398_T01, Zeama_GRMZM2G127850_T01, Zm protein kinase-related (ZM1s60983186), Orysa_LOC_Os03g46490, Zeama_GRMZM2G126566, Zeama_GRMZM2G031724, Zeama_GRMZM2G047684, Zm indole-3-acetic acid amido synthetase-like 1, Zm indole-3-acetic acid amido synthetase-like 2, Zeama_GRMZM2G031983_T01, Zeama_GRMZM2G347043, Orysa_LOC_Os06g01440, Zeama_GRMZM2G108716, Zm embryo-abundant protein-related, Zm ATP-binding protein, Zeama_unknown protein b.

[0016] Homologues of polypeptides from Table A preferably have in increasing order of preference at least 25%, 26%, 27%, 28%, 29%, 30%, 31%, 32%, 33%, 34%, 35%, 36%, 37%, 38%, 39%, 40%, 41%, 42%, 43%, 44%, 45%, 46%, 47%, 48%, 49%, 50%, 51%, 52%, 53%, 54%, 55%, 56%, 57%, 58%, 59%, 60%, 81%, 62%, 63%, 64%, 65%, 66%, 67%, 68%, 69%, 70%, 71%, 72%, 73%, 74%, 75%, 76%, 77%, 78%, 79%, 80%, 81%, 82%, 83%, 84%, 85%, 86%, 87%, 88%, 89%, 90%, 91%, 92%, 93%, 94%, 95%, 96%, 97%, 98%, or 99% overall sequence identity to one of the sequences of the proteins listed in Table A. The overall sequence identity is determined using a global alignment algorithm, such as the Needleman Wunsch algorithm in the program GAP (GCG Wisconsin Package, Accelrys), preferably with default parameters and preferably with sequences of mature proteins (i.e. without taking into account secretion signals or transit peptides). In one embodiment the sequence identity level is determined by comparison of the polypeptide sequences over the entire length of the sequence of the proteins listed in Table A.

[0017] Alternatively or additionally, homologues of polypeptides from Table A can be identified by screening for the presence of domains or motifs in common with one of the polypeptides from Table A or by screening for the same biological activity as that of one of the polypeptides from Table A. Tools for identifying domains are known in the art and comprise querying databases like InterPro (Hunter et al., Nucleic Acids Res. 37 (Database Issue):D224-228, 2009) with a protein sequence from Table A or of homologous sequences, as exemplified in Example 4. Also the identification of motifs is known in the art, for example by using the MEME algorithm (Bailey and Elkan, Proceedings of the Second International Conference on Intelligent Systems for Molecular Biology, pp. 28-36, AAAI Press, Menlo Park, Calif., 1994). At each position within a MEME motif, the residues are shown that are present in the query set of sequences with a frequency higher than 0.2. Residues within square brackets represent alternatives.

[0018] Alternatively or additionally, the sequence identity level is determined by comparison of one or more conserved domains or motifs in a given protein sequence provided in Table A with corresponding conserved domains or motifs in other GRP polypeptides. Compared to overall sequence identity, the sequence identity will generally be higher when only conserved domains or motifs are considered. Preferably the motifs in a GRP polypeptide have, in increasing order of preference, at least 70%, 71%, 72%, 73%, 74%, 75%, 76%, 77%, 78%, 79%, 80%, 81%, 82%, 83%, 84%, 85%, 86%, 87%, 88%, 89%, 90%, 91%, 92%, 93%, 94%, 95%, 96%, 97%, 98%, or 99% sequence identity to any one or more of the motifs present in a protein sequence of Table A.

[0019] The terms “domain”, “signature” and “motif” are defined in the “definitions” section herein. Preferably the homologue of a given protein from Table A has the same domain and motif organisation as in that particular protein from Table A.

[0020] According one embodiment, there is provided a method for improving yield-related traits as provided herein in plants relative to control plants, comprising modulating expression in a plant of a nucleic acid encoding a GRP polypeptide as defined herein, preferably a nucleic acid encoding a GRP polypeptide listed in Table A.

[0021] Preferably, GRP polypeptides (at least in their native form) typically have a biological function similar or identical to that of one of the polypeptides of Table A. Tools and techniques for measuring biological functions are known in the art. In addition, nucleic acids encoding GRP polypeptides, when expressed in rice according to the methods of the present invention as outlined in Examples 7 and 9, give plants having increased yield related traits, such a those provided in Example 10. Another function of the nucleic acid sequences encoding GRP polypeptides is to confer information for synthesis of the GRP protein that increases yield or yield related traits as described herein, when such a nucleic acid sequence of the invention is transcribed and translated in a living plant cell.

[0022] The present invention is illustrated by transforming plants with a nucleic acid sequence selected from Table A, encoding the GRP polypeptides. However, performance of the invention is not restricted to these sequences; the methods of the invention may advantageously be performed using any GRP-encoding nucleic acid or GRP polypeptide as defined herein. The term “GRP” or “GRP polypeptide” as used herein also intends to include homologues as defined hereunder of the proteins given in Table A. Preferably the homologue is an orthologue or a paralogue of a protein given in Table A, the terms “orthologues” and “paralogues” being as defined herein. Orthologues and paralogues may readily be identified by performing a so-called reciprocal blast search as described in the definitions section; where the query sequence is one of the protein or DNA sequences listed in Table A, the second BLAST (back-BLAST) would be against maize, rice or Arabidopsis sequences.

[0023] Nucleic acid variants may also be useful in practising the methods of the invention. Examples of such variants include nucleic acids encoding homologues and derivatives of any one of the amino acid sequences given in Table A of the Examples section, the terms “homologue” and “derivative” being as defined herein. Also useful in the methods of the invention are nucleic acids encoding homologues and derivatives of orthologues or paralogues of any one of the amino acid sequences given in Table A of the Examples section. Homologues and derivatives useful in the methods of the present invention have substantially the same biological and functional activity as the unmodified protein from which they are derived. Further variants useful in practising the methods of the invention are variants in which codon usage is optimised or in which miRNA target sites are removed.

[0024] Further nucleic acid variants useful in practising the methods of the invention include portions of nucleic acids encoding GRP polypeptides, nucleic acids hybridising to nucleic acids encoding GRP polypeptides, splice variants of nucleic acids encoding GRP polypeptides, allelic variants of nucleic acids encoding GRP polypeptides and variants of nucleic acids encoding GRP polypeptides obtained by gene shuffling. The terms hybridising sequence, splice variant, allelic variant and gene shuffling are as described herein.

[0025] Nucleic acids encoding GRP polypeptides need not be full-length nucleic acids, since performance of the methods of the invention does not rely on the use of full-length nucleic acid sequences. According to the present invention, there is provided a method for enhancing yield-related traits in plants, comprising introducing and expressing in a plant a portion of any one of the nucleic acid sequences given in Table A of the Examples section, or a portion of a nucleic acid encoding an orthologue, paralogue or homologue of any of the amino acid sequences given in Table A of the Examples section.

[0026] A portion of a nucleic acid may be prepared, for example, by making one or more deletions to the nucleic acid. The portions may be used in isolated form or they may be fused to other coding (or non-coding) sequences in order to, for example, produce a protein that combines several activities. When fused to other coding sequences, the resultant polypeptide produced upon translation may be bigger than that predicted for the protein portion.

[0027] Portions useful in the methods of the invention, encode a GRP polypeptide as defined herein or at least part thereof, and have substantially the same biological activity as the amino acid sequences given in Table A of the Examples section. Preferably, the portion is a portion of any one of the nucleic acids given in Table A of the Examples section, or is a portion of a nucleic acid encoding an orthologue or paralogue of any one of the amino acid sequences given in Table A of the Examples section. Preferably the portion is at least 100, 150, 200, 250, 300, 350, 400, 450, 500, 550, 600, 650, 700, 750, 800, 850, 900, 950, 1000 1050, 1100, 1150, 1200, 1250, 1300, 1350, 1400, 1450, 1500, 1600, 1700, 1800, 1900, 2000, 2100, 2200, 2300, 2400, 2500, 2600, 2700, 2800, 2900, 3000, 3100, 3200 consecutive nucleotides in length, the consecutive nucleotides being of any one of the nucleic acid sequences given in Table A of the Examples section, or of a nucleic acid encoding an orthologue or paralogue of any one of the amino acid sequences given in Table A of the Examples section. Most preferably the portion is a portion of a nucleic acid listed in Table A. Preferably, the portion encodes a fragment of an amino acid sequence which has at least 25% sequence identity to one of the proteins listed in Table A.

[0028] Another nucleic acid variant useful in the methods of the invention is a nucleic acid capable of hybridising, under reduced stringency conditions, preferably under stringent conditions, more preferably under conditions of high stringency, with a nucleic acid encoding a GRP polypeptide as defined herein, or with a portion as defined herein. According to the present invention, there is provided a method for enhancing yield-related traits in plants, comprising introducing and expressing in a plant a nucleic acid capable of hybridizing to the complement of a nucleic acid encoding any one of the proteins given in Table A of the Examples section, or to a nucleic acid encoding an orthologue, paralogue or homologue of any one of the proteins given in Table A.

[0029] Hybridising sequences useful in the methods of the invention encode a GRP polypeptide as defined herein, having substantially the same biological activity as any one of the amino acid sequences given in Table A of the Examples section. Preferably, the hybridising sequence is capable of hybridising to the complement of a nucleic acid encoding any one of the proteins given in Table A of the Examples section, or to a portion of any of these sequences, a portion being as defined herein, or the hybridising sequence is capable of hybridising to the complement of a nucleic acid encoding an orthologue or paralogue of any one of the amino acid sequences given in Table A of the Examples section. Most preferably, the hybridising sequence is capable of hybridising to the complement of a nucleic acid encoding the polypeptide as represented by one of the sequences given in Table A or to a portion thereof. In one embodiment, the hybridization conditions are of medium stringency, preferably of high stringency, as defined herein.

[0030] Preferably, the hybridising sequence encodes a polypeptide with an amino acid sequence which has at least 25% sequence identity to one of the proteins listed in Table A.

[0031] In another embodiment, there is provided a method for enhancing yield-related traits in plants, comprising introducing and expressing in a plant a splice variant of a nucleic acid encoding any one of the proteins given in Table A of the Examples section, or a splice variant of a nucleic acid encoding an orthologue, paralogue or homologue of any of the amino acid sequences given in Table A of the Examples section.

[0032] Preferred splice variants are splice variants of a nucleic acid provided in Table A, or a splice variant of a nucleic acid encoding an orthologue or paralogue of one of the proteins listed in Table A. Preferably, the amino acid sequence encoded by the splice variant has at least 25% sequence identity to one of the proteins listed in Table A.

[0033] In yet another embodiment, there is provided a method for enhancing yield-related traits in plants, comprising introducing and expressing in a plant an allelic variant of a nucleic acid encoding any one of the proteins given in Table A of the Examples section, or comprising introducing and expressing in a plant an allelic variant of a nucleic acid encoding an orthologue, paralogue or homologue of any of the amino acid sequences given in Table A of the Examples section.

[0034] The polypeptides encoded by allelic variants useful in the methods of the present invention have substantially the same biological activity as one of the GRP polypeptides listed in Table A of the Examples section. Allelic variants exist in nature, and encompassed within the methods of the present invention is the use of these natural alleles. Preferably, the allelic variant is an allelic variant of one of the nucleic acids provided in Table A or an allelic variant of a nucleic acid encoding an orthologue or paralogue of a protein listed in Table A. Preferably, the amino acid sequence encoded by the allelic variant has at least 25% sequence identity to one of the proteins listed in Table A.

[0035] In yet another embodiment, there is provided a method for enhancing yield-related traits in plants, comprising introducing and expressing in a plant a variant of any one of the nucleic acid sequences given in Table A of the Examples section, or comprising introducing and expressing in a plant a variant of a nucleic acid encoding an orthologue, paralogue or homologue of any of the amino acid sequences given in Table A of the Examples section, which variant nucleic acid is obtained by gene shuffling.

[0036] Preferably, the amino acid sequence encoded by the variant nucleic acid obtained by gene shuffling has at least 25% sequence identity to one of the proteins listed in Table A.

[0037] Furthermore, nucleic acid variants may also be obtained by site-directed mutagenesis. Several methods are available to achieve site-directed mutagenesis, the most common being PCR based methods (Current Protocols in Molecular Biology. Wiley Eds.). GRP polypeptides differing from the sequence of a protein listed in Table A by one or several amino acids (substitution(s), insertion(s) and/or deletion(s) as defined herein) may equally be useful to increase the yield of plants in the methods and constructs and plants of the invention.

[0038] Nucleic acids encoding GRP polypeptides may be derived from any natural or artificial source. The nucleic acid may be modified from its native form in composition and/or genomic environment through deliberate human manipulation. Preferably the GRP polypeptide-encoding nucleic acid is from a plant, further preferably from a monocotyledonous plant, more preferably from the family Poaceae, most preferably the nucleic acid is from Oryza sativa or Zea mays. In another embodiment, the GRP encoding nucleic acid is from a dicotyledonous plant, more preferably from the family Brassicaceae, most preferably the nucleic acid is from Arabidopsis thaliana. In a particular embodiment, the expression of the endogenous GRP encoding nucleic acid is downregulated. For optimal performance, the gene silencing techniques used for the reduction or substantial elimination of endogenous GRP gene expression require the use of GRP sequences that are substantially homologous to the endogenous GRP gene to be downregulated. For example, a GRP nucleic acid from rice (be it a full length GRP sequence or a fragment) is transformed into a rice plant. The GRP nucleic acid need not be introduced into the same plant variety. Most preferably, the GRP nucleic acid from rice is a sufficient length of substantially contiguous nucleotides of any one of the SEQ ID NOs listed in Table A or a sufficient length of substantially contiguous nucleotides of a nucleic acid sequence encoding an orthologue or paralogue of a GRP listed in Table A. A person skilled in the art would be well aware of what would constitute a sufficient length of substantially contiguous nucleotides to perform any of the gene silencing methods defined hereinabove, this may be as little as 20 or fewer substantially contiguous nucleotides in some cases.

[0039] In another embodiment the present invention extends to recombinant chromosomal DNA comprising a nucleic acid sequence useful in the methods of the invention, wherein said nucleic acid is present in the chromosomal DNA as a result of recombinant methods, but is not in its natural genetic environment. In a further embodiment the recombinant chromosomal DNA of the invention is comprised in a plant cell.

[0040] Performance of the methods of the invention gives plants having enhanced yield-related traits. In particular performance of the methods of the invention gives plants having increased early vigour and/or increased yield, especially increased biomass and/or increased seed yield relative to control plants. The terms “early vigour” “yield” and “seed yield” are described in more detail in the “definitions” section herein.

[0041] The present invention thus provides a method for increasing yield-related traits, especially one or more of early vigour, root biomass, shoot biomass, and seed yield of plants, relative to control plants, which method comprises modulating expression in a plant of a nucleic acid encoding a GRP polypeptide as defined herein.

[0042] According to a preferred feature of the present invention, performance of the methods of the invention gives plants having an increased growth rate relative to control plants. Therefore, according to the present invention, there is provided a method for increasing the growth rate of plants, which method comprises modulating expression in a plant of a nucleic acid encoding a GRP polypeptide as defined herein.

[0043] Performance of the methods of the invention gives plants grown under non-stress conditions or under mild drought conditions increased yield-related traits relative to control plants grown under comparable conditions. Therefore, according to the present invention, there is provided a method for increasing yield-related traits in plants grown under non-stress conditions or under mild drought conditions, which method comprises modulating expression in a plant of a nucleic acid encoding a GRP polypeptide.

[0044] Performance of the methods of the invention gives plants grown under conditions of drought, increased yield-related traits relative to control plants grown under comparable conditions. Therefore, according to the present invention, there is provided a method for increasing yield-related traits in plants grown under conditions of drought which method comprises modulating expression in a plant of a nucleic acid encoding a GRP polypeptide.

[0045] Performance of the methods of the invention gives plants grown under conditions of nutrient deficiency, particularly under conditions of nitrogen deficiency, increased yield-related traits relative to control plants grown under comparable conditions. Therefore, according to the present invention, there is provided a method for increasing yield-related traits in plants grown under conditions of nutrient deficiency, which method comprises modulating expression in a plant of a nucleic acid encoding a GRP polypeptide.

[0046] Performance of the methods of the invention gives plants grown under conditions of salt stress, increased yield-related traits relative to control plants grown under comparable conditions. Therefore, according to the present invention, there is provided a method for increasing yield-related traits in plants grown under conditions of salt stress, which method comprises modulating expression in a plant of a nucleic acid encoding a GRP polypeptide.

[0047] The invention also provides genetic constructs and vectors to facilitate introduction and/or expression in plants of nucleic acids encoding GRP polypeptides. The gene constructs may be inserted into vectors, which may be commercially available, suitable for transforming into plants or host cells and suitable for expression of the gene of interest in the transformed cells. The invention also provides use of a gene construct as defined herein in the methods of the invention.

[0048] More specifically, the present invention provides a construct comprising:
[0049] (a) a nucleic acid encoding a GRP polypeptide as defined above;
[0050] (b) one or more control sequences capable of driving expression of the nucleic acid sequence of (a); and optionally
[0051] (c) a transcription termination sequence.

[0052] Preferably, the nucleic acid encoding a GRP polypeptide is as defined above. The term “control sequence” and “termination sequence” are as defined herein.

[0053] The genetic construct of the invention may be comprised in a host cell, plant cell, seed, agricultural product or plant. Plants or host cells are transformed with a genetic construct such as a vector or an expression cassette comprising any of the nucleic acids described above. Thus the invention furthermore provides plants or host cells transformed with a construct as described above. In particular, the invention provides plants transformed with a construct as described above, which plants have increased yield-related traits as described herein.

[0054] In one embodiment the genetic construct of the invention confers increased yield or yield related traits(s) to a plant when it has been introduced into said plant, which plant expresses the nucleic acid encoding the GRP comprised in the genetic construct. In another embodiment the genetic construct of the invention confers increased yield or yield related traits(s) to a plant comprising plant cells in which the construct has been introduced, which plant cells express the nucleic acid encoding the GRP comprised in the genetic construct.

[0055] The skilled artisan is well aware of the genetic elements that must be present on the genetic construct in order to successfully transform, select and propagate host cells containing the sequence of interest. The sequence of interest is operably linked to one or more control sequences (at least to a promoter).

[0056] Advantageously, any type of promoter, whether natural or synthetic, may be used to drive expression of the nucleic acid sequence, but preferably the promoter is of plant origin. A constitutive promoter is particularly useful in the methods. See the “Definitions” section herein for definitions of the various promoter types.

[0057] In one embodiment, the constitutive promoter is a ubiquitous constitutive promoter of medium strength. Preferably it is a plant derived promoter, e.g. a promoter of plant chromosomal origin, such as a GOS2 promoter or a promoter of substantially the same strength and having substantially the same expression pattern (a functionally equivalent promoter), more preferably the promoter is the promoter GOS2 promoter from rice. Further preferably the constitutive promoter is represented by a nucleic acid sequence substantially similar to SEQ ID NO: 643, most preferably the constitutive promoter is as represented by SEQ ID NO: 643. In another embodiment, the constitutive promoter is a CaMV-35S promoter, preferably the 35S promoter is substantially similar to SEQ ID NO: 644. See the “Definitions” section herein for further examples of constitutive promoters.

[0058] According to another preferred embodiment of the invention, the nucleic acid encoding a GRP polypeptide is operably linked to a root-specific promoter. The root-specific promoter is preferably a pericycle specific UAS promoter (Brand and Perrimon Development 118(2): 401-415, 1993; Laplaze et al., The Plant cell, 19, 3889-38900, 2007) or a promoter of substantially the same strength and having substantially the same expression pattern (a functionally equivalent promoter). Examples of other root-specific promoters which may also be used to perform the methods of the invention are shown in Table 2b in the “Definitions” section.

[0059] It should be clear that the applicability of the present invention is not restricted to the GRP polypeptide-encoding nucleic acid represented by those listed in Table A, nor is the applicability of the invention restricted to the rice GOS2 promoter or to the 35S promoter when expression of a GRP polypeptide-encoding nucleic acid is driven by a constitutive promoter.

[0060] Optionally, one or more terminator sequences may be used in the construct introduced into a plant. Those skilled in the art will be aware of terminator sequences that may be suitable for use in performing the invention. In one embodiment, the construct comprises an expression cassette comprising a GOS2 promoter, substantially similar to SEQ ID NO: 643, operably linked to the nucleic acid encoding the GRP polypeptide. More preferably, the construct furthermore comprises a zein terminator (t-zein) linked to the 3′ end of the GRP coding sequence. In another embodiment, the construct comprises an expression cassette comprising a CaMV-35S promoter substantially similar to SEQ ID NO: 644, operably linked to the nucleic acid encoding the GRP polypeptide.

[0061] Furthermore, one or more sequences encoding selectable markers may be present on the construct introduced into a plant.

[0062] According to one embodiment of the invention, the modulated expression is increased expression. Methods for increasing expression of nucleic acids or genes, or gene products, are well documented in the art and examples are provided in the definitions section. In another embodiment, the modulated expression is decreased expression. Methods for decreasing expression of nucleic acids or genes, or gene products, are well documented in the art and examples are provided in the definitions section.

[0063] As mentioned above, a preferred method for modulating expression of a nucleic acid encoding a GRP polypeptide is by introducing and expressing in a plant a nucleic acid encoding a GRP polypeptide comprised in a genetic construct designed for either increased expression or for decreased expression; however the effects of performing the method, i.e. enhancing yield-related traits may also be achieved using other well known techniques, including but not limited to T-DNA activation tagging, TILLING, homologous recombination. A description of these techniques is provided in the definitions section.

[0064] The invention also provides a method for the production of transgenic plants having enhanced yield-related traits relative to control plants, comprising introduction and expression in a plant of any nucleic acid encoding a GRP polypeptide as defined herein.

[0065] More specifically, the present invention provides a method for the production of transgenic plants having enhanced yield-related traits, which method comprises:
[0066] (i) introducing and expressing in a plant or plant cell a GRP polypeptide-encoding nucleic acid or a genetic construct comprising a GRP polypeptide-encoding nucleic acid; and
[0067] (ii) cultivating the plant cell under conditions promoting plant growth and development.

[0068] The nucleic acid of (i) may be any of the nucleic acids capable of encoding a GRP polypeptide as defined herein.

[0069] Cultivating the plant cell under conditions promoting plant growth and development, may or may not include regeneration and/or growth to maturity. Accordingly, in a particular embodiment of the invention, the plant cell transformed by the method according to the invention is regenerable into a transformed plant. In another particular embodiment, the plant cell transformed by the method according to the invention is not regenerable into a transformed plant, i.e. cells that are not capable to regenerate into a plant using cell culture techniques known in the art. While plants cells generally have the characteristic of totipotency, some plant cells can not be used to regenerate or propagate intact plants from said cells. In one embodiment of the invention the plant cells of the invention are such cells. In another embodiment the plant cells of the invention are plant cells that do not sustain themselves in an autotrophic way.

[0070] The nucleic acid may be introduced directly into a plant cell or into the plant itself (including introduction into a tissue, organ or any other part of a plant). According to a preferred feature of the present invention, the nucleic acid is preferably introduced into a plant or plant cell by transformation. The term “transformation” is described in more detail in the “definitions” section herein.

[0071] In one embodiment the present invention extends to any plant cell or plant produced by any of the methods described herein, and to all plant parts and propagules thereof.

[0072] The present invention encompasses plants or parts thereof (including plant cells and seeds) obtainable by the methods according to the present invention. The plants or plant parts or plant cells comprise a nucleic acid transgene encoding a GRP polypeptide as defined above, preferably in a genetic construct such as an expression cassette. The present invention extends further to encompass the progeny of a primary transformed or transfected cell, tissue, organ or whole plant that has been produced by any of the aforementioned methods, the only requirement being that progeny exhibit the same genotypic and/or phenotypic characteristic(s) as those produced by the parent in the methods according to the invention.

[0073] In a further embodiment the invention extends to seeds comprising the expression cassettes of the invention, the genetic constructs of the invention, or the nucleic acids encoding the GRP and/or the GRP polypeptides as described above.

[0074] The invention also includes host cells containing an isolated nucleic acid encoding a GRP polypeptide as defined above. In one embodiment host cells according to the invention are plant cells, yeasts, bacteria or fungi. Host plants for the nucleic acids, construct, expression cassette or the vector used in the method according to the invention are, in principle, advantageously all plants which are capable of synthesizing the polypeptides used in the inventive method. In a particular embodiment the plant cells of the invention overexpress the nucleic acid molecule of the invention.

[0075] The methods of the invention are advantageously applicable to any plant, in particular to any plant as defined herein. Plants that are particularly useful in the methods of the invention include all plants which belong to the superfamily Viridiplantae, in particular monocotyledonous and dicotyledonous plants including fodder or forage legumes, ornamental plants, food crops, trees or shrubs. According to an embodiment of the present invention, the plant is a crop plant. Examples of crop plants include but are not limited to chicory, carrot, cassava, trefoil, soybean, beet, sugar beet, sunflower, canola, alfalfa, rapeseed, linseed, cotton, tomato, potato and tobacco. According to another embodiment of the present invention, the plant is a monocotyledonous plant. Examples of monocotyledonous plants include sugarcane. According to another embodiment of the present invention, the plant is a cereal. Examples of cereals include rice, maize, wheat, barley, millet, rye, triticale, sorghum, emmer, spelt, einkorn, teff, milo and oats. In a particular embodiment the plants used in the methods of the invention are selected from the group consisting of maize, wheat, rice, soybean, cotton, oilseed rape including canola, sugarcane, sugar beet and alfalfa. Advantageously the methods of the invention are more efficient than the known methods, because the plants of the invention have increased yield and/or tolerance to an environmental stress compared to control plants used in comparable methods.

[0076] The invention also extends to plants, plant parts or harvestable parts of a plant such as, but not limited to seeds, leaves, fruits, flowers, stems, roots, rhizomes, tubers and bulbs, which plants or plant parts or harvestable parts comprise a recombinant nucleic acid encoding a GRP polypeptide. The invention furthermore relates to products derived or produced, preferably directly derived or produced, from a harvestable part of such a plant, such as dry pellets, meal or powders, oil, fat and fatty acids, starch or proteins.

[0077] The invention also includes methods for manufacturing a product comprising a) growing the plants of the invention and b) producing said product from or by the plants of the invention or parts thereof, including seeds. In a further embodiment the methods comprise the steps of a) growing the plants of the invention, b) removing the harvestable parts as described herein from the plants and c) producing said product from, or with the harvestable parts of plants according to the invention.

[0078] In one embodiment the products produced by the methods of the invention are plant products such as, but not limited to, a foodstuff, feedstuff, a food supplement, feed supplement, fiber, cosmetic or pharmaceutical. In another embodiment the methods for production are used to make agricultural products such as, but not limited to, plant extracts, proteins, amino acids, carbohydrates, fats, oils, polymers, vitamins, and the like.

[0079] In yet another embodiment the polynucleotides or the polypeptides of the invention are comprised in an agricultural product. In a particular embodiment the nucleic acid sequences and protein sequences of the invention may be used as product markers, for example where an agricultural product was produced by the methods of the invention. Such a marker can be used to identify a product to have been produced by an advantageous process resulting not only in a greater efficiency of the process but also improved quality of the product due to increased quality of the plant material and harvestable parts used in the process. Such markers can be detected by a variety of methods known in the art, for example but not limited to PCR based methods for nucleic acid detection or antibody based methods for protein detection.

[0080] The present invention also encompasses use of nucleic acids encoding GRP polypeptides as described herein and use of these GRP polypeptides in enhancing any of the aforementioned yield-related traits in plants. For example, nucleic acids encoding GRP polypeptide described herein, or the GRP polypeptides themselves, may find use in breeding programmes in which a DNA marker is identified which may be genetically linked to a GRP polypeptide-encoding gene. The nucleic acids/genes, or the GRP polypeptides themselves may be used to define a molecular marker. This DNA or protein marker may then be used in breeding programmes to select plants having enhanced yield-related traits as defined herein in the methods of the invention. Furthermore, allelic variants of a GRP polypeptide-encoding nucleic acid/gene may find use in marker-assisted breeding programmes. Nucleic acids encoding GRP polypeptides may also be used as probes for genetically and physically mapping the genes that they are a part of, and as markers for traits linked to those genes. Such information may be useful in plant breeding in order to develop lines with desired phenotypes.

[0081] Moreover, the present invention relates to the following specific embodiments:
[0082] 1. A method for enhancing yield-related traits in plants relative to control plants, comprising modulating expression in a plant of a nucleic acid encoding a GRP polypeptide listed in Table A.
[0083] 2. Method according to embodiment 1, wherein said modulated expression is effected by introducing and expressing in a plant said nucleic acid encoding said GRP polypeptide.
[0084] 3. Method according to embodiment 1 or 2, wherein said enhanced yield-related traits comprise increased yield and/or increased early vigour relative to control plants, wherein said increased yield preferably comprises increased biomass and/or increased seed yield relative to control plants.
[0085] 4. Method according to any one of embodiments 1 to 3, wherein said enhanced yield-related traits are obtained under non-stress conditions.
[0086] 5. Method according to any one of embodiments 1 to 3, wherein said enhanced yield-related traits are obtained under conditions of drought stress, salt stress or nitrogen deficiency.
[0087] 6. Method according to any one of embodiments 1 to 5, wherein said nucleic acid encoding a GRP is of plant origin, preferably from a monocotyledonous or a dicotyledonous plant.
[0088] 7. Method according to any one of embodiments 1 to 6, wherein said nucleic acid encoding a GRP listed in Table A is a portion of such a nucleic acid, or a nucleic acid capable of hybridising with such a nucleic acid.
[0089] 8. Method according to any one of embodiments 1 to 7, wherein said nucleic acid sequence encodes an orthologue or paralogue of any of the polypeptides given in Table A.
[0090] 9. Method according to any one of embodiments 1 to 8, wherein said nucleic acid is operably linked to a constitutive promoter of plant origin, preferably to a medium strength constitutive promoter of plant origin, more preferably to a GOS2 promoter, most preferably to a GOS2 promoter from rice.
[0091] 10. Method according to any one of embodiments 1 to 8, wherein said nucleic acid is operably linked to a strong constitutive promoter, preferably the CaMV-35S promoter.
[0092] 11. Plant, or part thereof, or plant cell, obtainable by a method according to any one of embodiments 1 to 10, wherein said plant, plant part or plant cell comprises a recombinant nucleic acid encoding a GRP polypeptide as defined in any of embodiments 1 and 6 to 8.
[0093] 12. Construct comprising:
   [0094] (i) nucleic acid encoding an GRP as defined in any of embodiments 1 and 6 to 8;
   [0095] (ii) one or more control sequences capable of driving expression of the nucleic acid sequence of (i); and optionally
   [0096] (iii) a transcription termination sequence.
[0097] 13. Construct according to embodiment 12, wherein one of said control sequences is a constitutive promoter of plant origin, preferably to a medium strength constitutive promoter of plant origin, more preferably to a GOS2 promoter, most preferably to a GOS2 promoter from rice.
[0098] 14. Construct according to embodiment 12, wherein one of said control sequences is a strong constitutive promoter, preferably the CaMV-35S promoter.
[0099] 15. Use of a construct according to any one of embodiments 12 to 14 in a method for making plants having enhanced yield-related traits, preferably increased yield and/or early vigour relative to control plants.
[0100] 16. Plant, plant part or plant cell transformed with a construct according to any one of embodiments 12 to 14.
[0101] 17. Method for the production of a transgenic plant having enhanced yield-related traits relative to control plants, preferably increased yield and/or increased early vigour relative to control plants, and more preferably increased seed yield and/or increased biomass relative to control plants, comprising:
   [0102] (i) introducing and expressing in a plant cell or plant a nucleic acid encoding an GRP polypeptide as defined in any of embodiments 1 and 6 to 10; and
   [0103] (ii) cultivating said plant cell or plant under conditions promoting plant growth and development.
[0104] 18. Transgenic plant having enhanced yield-related traits relative to control plants, preferably increased yield and/or early vigour relative to control plants, resulting from modulated expression of a nucleic acid encoding an GRP polypeptide as defined in any of embodiments 1 and 6 to 8 or a transgenic plant cell derived from said transgenic plant.
[0105] 19. Transgenic plant according to embodiment 11, 16 or 18, or a transgenic plant cell derived therefrom, wherein said plant is a crop plant, such as beet, sugarbeet or alfalfa; or a monocotyledonous plant such as sugarcane; or a cereal, such as rice, maize, wheat, barley, millet, rye, triticale, sorghum, emmer, spelt, einkorn, teff, milo or oats.
[0106] 20. Harvestable parts of a plant according to embodiment 19, wherein said harvestable parts are preferably shoot biomass and/or root biomass and/or seeds.
[0107] 21. Products derived from a plant according to embodiment 19 and/or from harvestable parts of a plant according to embodiment 20.
[0108] 22. Use of a nucleic acid encoding an GRP polypeptide as defined in any of embodiments 1 and 6 to 8 for enhancing yield-related traits in plants relative to control plants, preferably for increasing yield and/or early vigour, relative to control plants.
[0109] 23. A method for manufacturing a product comprising the steps of growing the plants according to embodiment 12, 16, 19 or 20 and producing said product from or by said plants; or parts thereof, including seeds.
[0110] 24. Products produced from a plant according to embodiment 19 and/or from harvestable parts of a plant according to embodiment 20.
[0111] 25. Construct according to any one of embodiments 12 to 14 comprised in a plant cell.
[0112] 26. Recombinant chromosomal DNA comprising the construct according to any one of embodiments 12 to 14.

### DEFINITIONS

[0113] The following definitions will be used throughout the present application. The section captions and headings in this application are for convenience and reference purpose only and should not affect in any way the meaning or interpretation of this application. The technical terms and expressions used within the scope of this application are generally to be given the meaning commonly applied to them in the pertinent art of plant biology, molecular biology, bioinformatics and plant breeding. All of the following term definitions apply to the complete content of this application. The term “essentially”, “about”, “approximately” and the like in connection with an attribute or a value, particularly also define exactly the attribute or exactly the value, respectively. The term “about” in the context of a given numeric value or range relates in particular to a value or range that is within 20%, within 10%, or within 5% of the value or range given.

### Peptide(s)/Protein(s)

[0114] The terms “peptides”, “oligopeptides”, “polypeptide” and “protein” are used interchangeably herein and refer to amino acids in a polymeric form of any length, linked together by peptide bonds, unless mentioned herein otherwise.

### Polynucleotide(s)/Nucleic Acid(s)/Nucleic Acid Sequence(s)/Nucleotide Sequence(s)

[0115] The terms “polynucleotide(s)”, “nucleic acid sequence(s)”, “nucleotide sequence(s)”, “nucleic acid(s)”, “nucleic acid molecule” are used interchangeably herein and refer to nucleotides, either ribonucleotides or deoxyribonucleotides or a combination of both, in a polymeric unbranched form of any length.

### Homologue(s)

[0116] “Homologues” of a protein encompass peptides, oligopeptides, polypeptides, proteins and enzymes having amino acid substitutions, deletions and/or insertions relative to the unmodified protein in question and having similar biological and functional activity as the unmodified protein from which they are derived.

[0117] Orthologues and paralogues are two different forms of homologues and encompass evolutionary concepts used to describe the ancestral relationships of genes. Paralogues are genes within the same species that have originated through duplication of an ancestral gene; orthologues are genes from different organisms that have originated through speciation, and are also derived from a common ancestral gene.

[0118] A “deletion” refers to removal of one or more amino acids from a protein.

[0119] An “insertion” refers to one or more amino acid residues being introduced into a predetermined site in a protein. Insertions may comprise N-terminal and/or C-terminal fusions as well as intra-sequence insertions of single or multiple amino acids. Generally, insertions within the amino acid sequence will be smaller than N- or C-terminal fusions, of the order of about 1 to 10 residues. Examples of N- or C-terminal fusion proteins or peptides include the binding domain or activation domain of a transcriptional activator as used in the yeast two-hybrid system, phage coat proteins, (histidine)-6-tag, glutathione S-transferase-tag, protein A, maltose-binding protein, dihydrofolate reductase, Tag•100 epitope, c-myc epitope, FLAG®-epitope, lacZ, CMP (calmodulin-binding peptide), HA epitope, protein C epitope and VSV epitope.

[0120] A “substitution” refers to replacement of amino acids of the protein with other amino acids having similar properties (such as similar hydrophobicity, hydrophilicity, antigenicity, propensity to form or break α-helical structures or β-sheet structures). Amino acid substitutions are typically of single residues, but may be clustered depending upon functional constraints placed upon the polypeptide and may range from 1 to 10 amino acids. The amino acid substitutions are preferably conservative amino acid substitutions. Conservative substitution tables are well known in the art (see for example Creighton (1984) Proteins. W.H. Freeman and Company (Eds) and Table 1 below).

TABLE 1
Examples of conserved amino acid substitutions

| | Conservative |
|---|---|
| Residue | Substitutions |
| Ala | Ser |
| Arg | Lys |
| Asn | Gln; His |
| Asp | Glu |
| Gln | Asn |
| Cys | Ser |
| Glu | Asp |
| Gly | Pro |
| His | Asn; Gln |
| Ile | Leu, Val |
| Leu | Ile; Val |
| Lys | Arg; Gin |
| Met | Leu; Ile |
| Phe | Met; Leu; Tyr |
| Ser | Thr; Gly |
| Thr | Ser; Val |
| Trp | Tyr |
| Tyr | Trp; Phe |
| Val | Ile; Leu |

[0121] Amino acid substitutions, deletions and/or insertions may readily be made using peptide synthetic techniques known in the art, such as solid phase peptide synthesis and the like, or by recombinant DNA manipulation. Methods for the manipulation of DNA sequences to produce substitution, insertion or deletion variants of a protein are well known in the art. For example, techniques for making substitution mutations at predetermined sites in DNA are well known to those skilled in the art and include M13 mutagenesis, T7-Gen in vitro mutagenesis (USB, Cleveland, Ohio), QuickChange Site Directed mutagenesis (Stratagene, San Diego, Calif.), PCR-mediated site-directed mutagenesis or other site-directed mutagenesis protocols (see Current Protocols in Molecular Biology, John Wiley & Sons, N.Y. (1989 and yearly updates)).

### Derivatives

[0122] “Derivatives” include peptides, oligopeptides, polypeptides which may, compared to the amino acid sequence of the naturally-occurring form of the protein, such as the protein of interest, comprise substitutions of amino acids with non-naturally occurring amino acid residues, or additions of non-naturally occurring amino acid residues. “Derivatives” of a protein also encompass peptides, oligopeptides, polypeptides which comprise naturally occurring altered (glycosylated, acylated, prenylated, phosphorylated, myristoylated, sulphated etc.) or non-naturally altered amino acid residues compared to the amino acid sequence of a naturally-occurring form of the polypeptide. A derivative may also comprise one or more non-amino acid substituents or additions compared to the amino acid sequence from which it is derived, for example a reporter molecule or other ligand, covalently or non-covalently bound to the amino acid sequence, such as a reporter molecule which is bound to facilitate its detection, and non-naturally occurring amino acid residues relative to the amino acid sequence of a naturally-occurring protein. Furthermore, “derivatives” also include fusions of the naturally-occurring form of the protein with tagging peptides such as FLAG, HIS6 or thioredoxin (for a review of tagging peptides, see Terpe, Appl. Microbiol. Biotechnol. 60, 523-533, 2003).

### Domain, Motif/Consensus Sequence/Signature

[0123] The term “domain” refers to a set of amino acids conserved at specific positions along an alignment of sequences of evolutionarily related proteins. While amino acids at other positions can vary between homologues, amino acids that are highly conserved at specific positions indicate amino acids that are likely essential in the structure, stability or function of a protein. Identified by their high degree of conservation in aligned sequences of a family of protein homologues, they can be used as identifiers to determine if any polypeptide in question belongs to a previously identified polypeptide family.

[0124] The term “motif” or “consensus sequence” or “signature” refers to a short conserved region in the sequence of evolutionarily related proteins. Motifs are frequently highly conserved parts of domains, but may also include only part of the domain, or be located outside of conserved domain (if all of the amino acids of the motif fall outside of a defined domain).

[0125] Specialist databases exist for the identification of domains, for example, SMART (Schultz et al. (1998) Proc. Natl. Acad. Sci. USA 95, 5857-5864; Letunic et al. (2002) Nucleic Acids Res 30, 242-244), InterPro (Mulder et al., (2003) Nucl. Acids. Res. 31, 315-318), Prosite (Bucher and Bairoch (1994), A generalized profile syntax for biomolecular sequences motifs and its function in automatic sequence interpretation. (In) ISMB-94; Proceedings 2nd International Conference on Intelligent Systems for Molecular Biology. Altman R., Brutlag D., Karp P., Lathrop R., Searls D., Eds., pp 53-61, AAAI Press, Menlo Park; Hulo et al., Nucl. Acids. Res. 32:D134-D137, (2004)), or Pfam (Bateman et al., Nucleic Acids Research 30(1): 276-280 (2002)). A set of tools for in silico analysis of protein sequences is available on the ExPASy proteomics server (Swiss Institute of Bioinformatics (Gasteiger et al., ExPASy: the proteomics server for in-depth protein knowledge and analysis, Nucleic Acids Res. 31:3784-3788(2003)). Domains or motifs may also be identified using routine techniques, such as by sequence alignment.

[0126] Methods for the alignment of sequences for comparison are well known in the art, such methods include GAP, BESTFIT, BLAST, FASTA and TFASTA. GAP uses the algorithm of Needleman and Wunsch ((1970) J Mol Biol 48: 443-453) to find the global (i.e. spanning the complete sequences) alignment of two sequences that maximizes the number of matches and minimizes the number of gaps. The BLAST algorithm (Altschul et al. (1990) J Mol Biol 215: 403-10) calculates percent sequence identity and performs a statistical analysis of the similarity between the two sequences. The software for performing BLAST analysis is publicly available through the National Centre for Biotechnology Information (NCBI). Homologues may readily be identified using, for example, the ClustalW multiple sequence alignment algorithm (version 1.83), with the default pairwise alignment parameters, and a scoring method in percentage. Global percentages of similarity and identity may also be determined using one of the methods available in the MatGAT software package (Campanella et al., BMC Bioinformatics. 2003 Jul. 10; 4:29. MatGAT: an application that generates similarity/identity matrices using protein or DNA sequences.). Minor manual editing may be performed to optimise alignment between conserved motifs, as would be apparent to a person skilled in the art. Furthermore, instead of using full-length sequences for the identification of homologues, specific domains may also be used. The sequence identity values may be determined over the entire nucleic acid or amino acid sequence or over selected domains or conserved motif(s), using the programs mentioned above using the default parameters. For local alignments, the Smith-Waterman algorithm is particularly useful (Smith T F, Waterman M S (1981) J. Mol. Biol 147(1); 195-7).

### Reciprocal BLAST

[0127] Typically, this involves a first BLAST involving BLASTing a query sequence (for example using any of the sequences listed in Table A of the Examples section) against any sequence database, such as the publicly available NCBI database. BLASTN or TBLASTX (using standard default values) are generally used when starting from a nucleotide sequence, and BLASTP or TBLASTN (using standard default values) when starting from a protein sequence. The BLAST results may optionally be filtered. The full-length sequences of either the filtered results or non-filtered results are then BLASTed back (second BLAST) against sequences from the organism from which the query sequence is derived. The results of the first and second BLASTs are then compared. A paralogue is identified if a high-ranking hit from the first blast is from the same species as from which the query sequence is derived, a BLAST back then ideally results in the query sequence amongst the highest hits; an orthologue is identified if a high-ranking hit in the first BLAST is not from the same species as from which the query sequence is derived, and preferably results upon BLAST back in the query sequence being among the highest hits.

[0128] High-ranking hits are those having a low E-value. The lower the E-value, the more significant the score (or in other words the lower the chance that the hit was found by chance). Computation of the E-value is well known in the art. In addition to E-values, comparisons are also scored by percentage identity. Percentage identity refers to the number of identical nucleotides (or amino acids) between the two compared nucleic acid (or polypeptide) sequences over a particular length. In the case of large families, ClustalW may be used, followed by a neighbour joining tree, to help visualize clustering of related genes and to identify orthologues and paralogues.

### Hybridisation

[0129] The term “hybridisation” as defined herein is a process wherein substantially homologous complementary nucleotide sequences anneal to each other. The hybridisation process can occur entirely in solution, i.e. both complementary nucleic acids are in solution. The hybridisation process can also occur with one of the complementary nucleic acids immobilised to a matrix such as magnetic beads, Sepharose beads or any other resin. The hybridisation process can furthermore occur with one of the complementary nucleic acids immobilised to a solid support such as a nitro-cellulose or nylon membrane or immobilised by e.g. photolithography to, for example, a siliceous glass support (the latter known as nucleic acid arrays or microarrays or as nucleic acid chips). In order to allow hybridisation to occur, the nucleic acid molecules are generally thermally or chemically denatured to melt a double strand into two single strands and/or to remove hairpins or other secondary structures from single stranded nucleic acids.

[0130] The term “stringency” refers to the conditions under which a hybridisation takes place. The stringency of hybridisation is influenced by conditions such as temperature, salt concentration, ionic strength and hybridisation buffer composition. Generally, low stringency conditions are selected to be about 30° C. lower than the thermal melting point (Tₘ) for the specific sequence at a defined ionic strength and pH. Medium stringency conditions are when the temperature is 20° C. below Tₘ, and high stringency conditions are when the temperature is 10° C. below Tₘ. High stringency hybridisation conditions are typically used for isolating hybridising sequences that have high sequence similarity to the target nucleic acid sequence. However, nucleic acids may deviate in sequence and still encode a substantially identical polypeptide, due to the degeneracy of the genetic code. Therefore medium stringency hybridisation conditions may sometimes be needed to identify such nucleic acid molecules.

[0131] The Tₘ is the temperature under defined ionic strength and pH, at which 50% of the target sequence hybridises to a perfectly matched probe. The Tₘ is dependent upon the solution conditions and the base composition and length of the probe. For example, longer sequences hybridise specifically at higher temperatures. The maximum rate of hybridisation is obtained from about 16° C. up to 32° C. below Tₘ. The presence of monovalent cations in the hybridisation solution reduce the electrostatic repulsion between the two nucleic acid strands thereby promoting hybrid formation; this effect is visible for sodium concentrations of up to 0.4M (for higher concentrations, this effect may be ignored). Formamide reduces the melting temperature of DNA-DNA and DNA-RNA duplexes with 0.6 to 0.7° C. for each percent formamide, and addition of 50% formamide allows hybridisation to be performed at 30 to 45° C., though the rate of hybridisation will be lowered. Base pair mismatches reduce the hybridisation rate and the thermal stability of the duplexes. On average and for large probes, the Tm decreases about 1° C. per % base mismatch. The Tₘ may be calculated using the following equations, depending on the types of hybrids:

1) DNA-DNA hybrids (Meinkoth and Wahl, Anal. Biochem., 138: 267-284, 1984):

Tₘ=81.5° C.+16.6x log₁₀[Na⁺]^{a}+0.41x%[G/C^{b}]−500x[L^{c}]⁻¹−0.61x % formamide

2) DNA-RNA or RNA-RNA hybrids:

Tₘ=79.8° C.+18.5(log₁₀[Na⁺]^{a})+0.58(% G/C^{b})+11.8(% G/C^{b})²−820/L^{c}

3) oligo-DNA or oligo-RNAs hybrids:
[0132] For <20 nucleotides: Tₘ=2 (Iₙ)
[0133] For 20-35 nucleotides: Tₘ=22+1.46 (Iₙ)
   ^{a} or for other monovalent cation, but only accurate in the 0.01-0.4 M range.
   ^{b} only accurate for % GC in the 30% to 75% range.
   ^{c}=length of duplex in base pairs.
   ^{d} oligo, oligonucleotide; Iₙ,=effective length of primer=2×(no. of G/C)+(no. of A/T).

[0134] Non-specific binding may be controlled using any one of a number of known techniques such as, for example, blocking the membrane with protein containing solutions, additions of heterologous RNA, DNA, and SDS to the hybridisation buffer, and treatment with Rnase. For non-homologous probes, a series of hybridizations may be performed by varying one of (i) progressively lowering the annealing temperature (for example from 68° C. to 42° C.) or (ii) progressively lowering the formamide concentration (for example from 50% to 0%). The skilled artisan is aware of various parameters which may be altered during hybridisation and which will either maintain or change the stringency conditions.

[0135] Besides the hybridisation conditions, specificity of hybridisation typically also depends on the function of post-hybridisation washes. To remove background resulting from non-specific hybridisation, samples are washed with dilute salt solutions. Critical factors of such washes include the ionic strength and temperature of the final wash solution: the lower the salt concentration and the higher the wash temperature, the higher the stringency of the wash. Wash conditions are typically performed at or below hybridisation stringency. A positive hybridisation gives a signal that is at least twice of that of the background. Generally, suitable stringent conditions for nucleic acid hybridisation assays or gene amplification detection procedures are as set forth above. More or less stringent conditions may also be selected. The skilled artisan is aware of various parameters which may be altered during washing and which will either maintain or change the stringency conditions.

[0136] For example, typical high stringency hybridisation conditions for DNA hybrids longer than 50 nucleotides encompass hybridisation at 65° C. in 1×SSC or at 42° C. in 1×SSC and 50% formamide, followed by washing at 65° C. in 0.3×SSC. Examples of medium stringency hybridisation conditions for DNA hybrids longer than 50 nucleotides encompass hybridisation at 50° C. in 4×SSC or at 40° C. in 6×SSC and 50% formamide, followed by washing at 50° C. in 2×SSC. The length of the hybrid is the anticipated length for the hybridising nucleic acid. When nucleic acids of known sequence are hybridised, the hybrid length may be determined by aligning the sequences and identifying the conserved regions described herein. 1×SSC is 0.15M NaCl and 15 mM sodium citrate; the hybridisation solution and wash solutions may additionally include 5×Denhardt's reagent, 0.5-1.0% SDS, 100 μg/ml denatured, fragmented salmon sperm DNA, 0.5% sodium pyrophosphate.

[0137] For the purposes of defining the level of stringency, reference can be made to Sambrook et al. (2001) Molecular Cloning: a laboratory manual, 3^{rd} Edition, Cold Spring Harbor Laboratory Press, CSH, New York or to Current Protocols in Molecular Biology, John Wiley & Sons, N.Y. (1989 and yearly updates).

### Splice Variant

[0138] The term “splice variant” as used herein encompasses variants of a nucleic acid sequence in which selected introns and/or exons have been excised, replaced, displaced or added, or in which introns have been shortened or lengthened. Such variants will be ones in which the biological activity of the protein is substantially retained; this may be achieved by selectively retaining functional segments of the protein. Such splice variants may be found in nature or may be manmade. Methods for predicting and isolating such splice variants are well known in the art (see for example Foissac and Schiex (2005) BMC Bioinformatics 6: 25).

### Allelic Variant

[0139] “Alleles” or “allelic variants” are alternative forms of a given gene, located at the same chromosomal position. Allelic variants encompass Single Nucleotide Polymorphisms (SNPs), as well as Small Insertion/Deletion Polymorphisms (INDELs). The size of INDELs is usually less than 100 bp. SNPs and INDELs form the largest set of sequence variants in naturally occurring polymorphic strains of most organisms.

### Endogenous Gene

[0140] Reference herein to an “endogenous” gene not only refers to the gene in question as found in a plant in its natural form (i.e., without there being any human intervention), but also refers to that same gene (or a substantially homologous nucleic acid/gene) in an isolated form subsequently (re)introduced into a plant (a transgene). For example, a transgenic plant containing such a transgene may encounter a substantial reduction of the transgene expression and/or substantial reduction of expression of the endogenous gene. The isolated gene may be isolated from an organism or may be manmade, for example by chemical synthesis.

### Gene Shuffling/Directed Evolution

[0141] “Gene shuffling” or “directed evolution” consists of iterations of DNA shuffling followed by appropriate screening and/or selection to generate variants of nucleic acids or portions thereof encoding proteins having a modified biological activity (Castle et al., (2004) Science 304(5674): 1151-4; U.S. Pat. Nos. 5,811,238 and 6,395,547).

### Construct

[0142] Artificial DNA (such as but, not limited to plasmids or viral DNA) capable of replication in a host cell and used for introduction of a DNA sequence of interest into a host cell or host organism. Host cells of the invention may be any cell selected from bacterial cells, such as Escherichia coli or Agrobacterium species cells, yeast cells, fungal, algal or cyanobacterial cells or plant cells. The skilled artisan is well aware of the genetic elements that must be present on the genetic construct in order to successfully transform, select and propagate host cells containing the sequence of interest. The sequence of interest is operably linked to one or more control sequences (at least to a promoter) as described herein. Additional regulatory elements may include transcriptional as well as translational enhancers. Those skilled in the art will be aware of terminator and enhancer sequences that may be suitable for use in performing the invention. An intron sequence may also be added to the 5′ untranslated region (UTR) or in the coding sequence to increase the amount of the mature message that accumulates in the cytosol, as described in the definitions section. Other control sequences (besides promoter, enhancer, silencer, intron sequences, 3′UTR and/or 5′UTR regions) may be protein and/or RNA stabilizing elements. Such sequences would be known or may readily be obtained by a person skilled in the art.

[0143] The genetic constructs of the invention may further include an origin of replication sequence that is required for maintenance and/or replication in a specific cell type. One example is when a genetic construct is required to be maintained in a bacterial cell as an episomal genetic element (e.g. plasmid or cosmid molecule). Preferred origins of replication include, but are not limited to, the f1-ori and colE1.

[0144] For the detection of the successful transfer of the nucleic acid sequences as used in the methods of the invention and/or selection of transgenic plants comprising these nucleic acids, it is advantageous to use marker genes (or reporter genes). Therefore, the genetic construct may optionally comprise a selectable marker gene. Selectable markers are described in more detail in the “definitions” section herein. The marker genes may be removed or excised from the transgenic cell once they are no longer needed. Techniques for marker removal are known in the art, useful techniques are described above in the definitions section.

### Regulatory Element/Control Sequence/Promoter

[0145] The terms “regulatory element”, “control sequence” and “promoter” are all used interchangeably herein and are to be taken in a broad context to refer to regulatory nucleic acid sequences capable of effecting expression of the sequences to which they are ligated. The term “promoter” typically refers to a nucleic acid control sequence located upstream from the transcriptional start of a gene and which is involved in recognising and binding of RNA polymerase and other proteins, thereby directing transcription of an operably linked nucleic acid. Encompassed by the aforementioned terms are transcriptional regulatory sequences derived from a classical eukaryotic genomic gene (including the TATA box which is required for accurate transcription initiation, with or without a CCAAT box sequence) and additional regulatory elements (i.e. upstream activating sequences, enhancers and silencers) which alter gene expression in response to developmental and/or external stimuli, or in a tissue-specific manner. Also included within the term is a transcriptional regulatory sequence of a classical prokaryotic gene, in which case it may include a −35 box sequence and/or −10 box transcriptional regulatory sequences. The term “regulatory element” also encompasses a synthetic fusion molecule or derivative that confers, activates or enhances expression of a nucleic acid molecule in a cell, tissue or organ.

[0146] A “plant promoter” comprises regulatory elements, which mediate the expression of a coding sequence segment in plant cells. Accordingly, a plant promoter need not be of plant origin, but may originate from viruses or micro-organisms, for example from viruses which attack plant cells. The “plant promoter” can also originate from a plant cell, e.g. from the plant which is transformed with the nucleic acid sequence to be expressed in the inventive process and described herein. This also applies to other “plant” regulatory signals, such as “plant” terminators. The promoters upstream of the nucleotide sequences useful in the methods of the present invention can be modified by one or more nucleotide substitution(s), insertion(s) and/or deletion(s) without interfering with the functionality or activity of either the promoters, the open reading frame (ORF) or the 3′-regulatory region such as terminators or other 3′ regulatory regions which are located away from the ORF. It is furthermore possible that the activity of the promoters is increased by modification of their sequence, or that they are replaced completely by more active promoters, even promoters from heterologous organisms. For expression in plants, the nucleic acid molecule must, as described above, be linked operably to or comprise a suitable promoter which expresses the gene at the right point in time and with the required spatial expression pattern.

[0147] For the identification of functionally equivalent promoters, the promoter strength and/or expression pattern of a candidate promoter may be analysed for example by operably linking the promoter to a reporter gene and assaying the expression level and pattern of the reporter gene in various tissues of the plant. Suitable well-known reporter genes include for example beta-glucuronidase or beta-galactosidase. The promoter activity is assayed by measuring the enzymatic activity of the beta-glucuronidase or beta-galactosidase. The promoter strength and/or expression pattern may then be compared to that of a reference promoter (such as the one used in the methods of the present invention). Alternatively, promoter strength may be assayed by quantifying mRNA levels or by comparing mRNA levels of the nucleic acid used in the methods of the present invention, with mRNA levels of housekeeping genes such as 18S rRNA, using methods known in the art, such as Northern blotting with densitometric analysis of autoradiograms, quantitative real-time PCR or RT-PCR (Heid et al., 1996 Genome Methods 6: 986-994). Generally by “weak promoter” is intended a promoter that drives expression of a coding sequence at a low level. By “low level” is intended at levels of about 1/10,000 transcripts to about 1/100,000 transcripts, to about 1/500,0000 transcripts per cell. Conversely, a “strong promoter” drives expression of a coding sequence at high level, or at about 1/10 transcripts to about 1/100 transcripts to about 1/1000 transcripts per cell. Generally, by “medium strength promoter” is intended a promoter that drives expression of a coding sequence at a lower level than a strong promoter, in particular at a level that is in all instances below that obtained when under the control of a 35S CaMV promoter.

### Operably Linked

[0148] The term “operably linked” as used herein refers to a functional linkage between the promoter sequence and the gene of interest, such that the promoter sequence is able to initiate transcription of the gene of interest.

### Constitutive Promoter

[0149] A “constitutive promoter” refers to a promoter that is transcriptionally active during most, but not necessarily all, phases of growth and development and under most environmental conditions, in at least one cell, tissue or organ. Table 2a below gives examples of constitutive promoters.

TABLE 2a
Examples of constitutive promoters

| Gene Source | Reference |
|---|---|
| Actin | McElroy et al, Plant Cell, 2: 163-171, 1990 |
| HMGP | WO 2004/070039 |
| CAMV 35S | Odell et al, Nature, 313: 810-812, 1985 |
| CaMV 19S | Nilsson et al., Physiol. Plant. 100 : 456-462, 1997 |
| GOS2 | de Pater et al, Plant J Nov; |
| | 2 (6): 837-44, 1992, WO 2004/065596 |
| Ubiquitin | Christensen et al, Plant Mol. Biol. 18: 675-689, 1992 |
| Rice cyclophilin | Buchholz et al, Plant Mol Biol. 25 (5): 837-43, 1994 |
| Maize H3 histone | Lepetit et al, Mol. Gen. Genet. 231: 276-285, 1992 |
| Alfalfa H3 histone | Wu et al. Plant Mol. Biol. 11: 641-649, 1988 |
| Actin 2 | An et al, Plant J. 10 (1); 107-121, 1996 |
| 34S FMV | Sanger et al., Plant. Mol. Biol., 14, 1990: 433-443 |
| Rubisco | U.S. Pat. No. 4,962,028 |
| small subunit | |
| OCS | Leisner (1988) Proc Natl Acad Sci USA 85(5): 2553 |
| SAD1 | Jain et al., Crop Science, 39 (6), 1999: 1696 |
| SAD2 | Jain et al., Crop Science, 39 (6), 1999: 1696 |
| nos | Shaw et al. (1984) Nucleic |
| | Acids Res. 12 (20): 7831-7846 |
| V-ATPase | WO 01/14572 |
| Super promoter | WO 95/14098 |
| G-box proteins | WO 94/12015 |

### Ubiquitous Promoter

[0150] A “ubiquitous promoter” is active in substantially all tissues or cells of an organism.

### Developmentally-Regulated Promoter

[0151] A “developmentally-regulated promoter” is active during certain developmental stages or in parts of the plant that undergo developmental changes.

### Inducible Promoter

[0152] An “inducible promoter” has induced or increased transcription initiation in response to a chemical (for a review see Gatz 1997, Annu. Rev. Plant Physiol. Plant Mol. Biol., 48:89-108), environmental or physical stimulus, or may be “stress-inducible”, i.e. activated when a plant is exposed to various stress conditions, or a “pathogen-inducible” i.e. activated when a plant is exposed to exposure to various pathogens.

### Organ-Specific/Tissue-Specific Promoter

[0153] An “organ-specific” or “tissue-specific promoter” is one that is capable of preferentially initiating transcription in certain organs or tissues, such as the leaves, roots, seed tissue etc. For example, a “root-specific promoter” is a promoter that is transcriptionally active predominantly in plant roots, substantially to the exclusion of any other parts of a plant, whilst still allowing for any leaky expression in these other plant parts. Promoters able to initiate transcription in certain cells only are referred to herein as “cell-specific”.

[0154] Examples of root-specific promoters are listed in Table 2b below:

TABLE 2b
Examples of root-specific promoters

| Gene Source | Reference |
|---|---|
| RCc3 | Plant Mol Biol. 1995 January; 27 (2): 237-48 |
| Arabidopsis PHT1 | Koyama et al. J Biosci Bioeng. |
| | 2005 January; 99 (1): 38-42. ; |
| | Mudge et al. (2002, Plant J. 31:341) |
| Medicago phosphate | Xiao et al., 2006, Plant Biol (Stuttg). |
| transporter | 2006 July; 8 (4): 439-49 |
| Arabidopsis Pyk10 | Nitz et al. (2001) Plant Sci 161(2): 337-346 |
| root-expressible genes | Tingey et al., EMBO J. 6: 1, 1987. |
| tobacco auxin-inducible | Van der Zaal et al., Plant Mol. Biol. |
| gene | 16, 983, 1991. |
| β-tubulin | Oppenheimer, et al., Gene 63: 87, 1988. |
| tobacco root-specific | Conkling, et al., Plant Physiol. 93: 1203, 1990. |
| genes | |
| B. napus G1-3b gene | U. S. Pat. No. 5,401,836 |
| SbPRP1 | Suzuki et al., Plant Mol. Biol. 21: 109-119, 1993. |
| LRX1 | Baumberger et al. 2001, Genes & Dev. 15: 1128 |
| BTG-26 Brassica napus | US 20050044585 |
| LeAMT1 (tomato) | Lauter et al. (1996, PNAS 3: 8139) |
| The LeNRT1-1 (tomato) | Lauter et al. (1996, PNAS 3:8139) |
| class I patatin gene | Liu et al., Plant Mol. Biol. 17 (6): 1139-1154 |
| (potato) | |
| KDC1 (Daucus carota) | Downey et al. (2000, J. Biol. Chem. 275: 39420) |
| TobRB7 gene | W Song (1997) PhD Thesis, |
| | North Carolina State University, |
| | Raleigh, NC USA |
| OsRAB5a (rice) | Wang et al. 2002, Plant Sci. 163: 273 |
| ALF5 (Arabidopsis) | Diener et al. (2001, Plant Cell 13: 1625) |
| NRT2; 1Np (N. | Quesada et al. (1997, Plant Mol. Biol. 34: 265) |
| plumbaginifolia) | |

[0155] A “seed-specific promoter” is transcriptionally active predominantly in seed tissue, but not necessarily exclusively in seed tissue (in cases of leaky expression). The seed-specific promoter may be active during seed development and/or during germination. The seed specific promoter may be endosperm/aleurone/embryo specific. Examples of seed-specific promoters (endosperm/aleurone/embryo specific) are shown in Table 2c to Table 2f below. Further examples of seed-specific promoters are given in Qing Qu and Takaiwa (Plant Biotechnol. J. 2, 113-125, 2004), which disclosure is incorporated by reference herein as if fully set forth.

TABLE 2c
Examples of seed-specific promoters

| Gene source | Reference |
|---|---|
| seed-specific genes | Simon et al., |
| | Plant Mol. Biol. 5: 191, 1985; |
| | Scofield et al., |
| | J. Biol. Chem. 262: 12202, 1987.; |
| | Baszczynski et al., |
| | Plant Mol. Biol. 14: 633, 1990. |
| Brazil Nut albumin | Pearson et al., |
| | Plant Mol. Biol. 18: 235-245, 1992. |
| legumin | Ellis et al., |
| | Plant Mol. Biol. 10: 203-214, 1988. |
| glutelin (rice) | Takaiwa et al., |
| | Mol. Gen. Genet. 208: 15-22, 1986; |
| | Takaiwa et al., FEBS Letts. 221: 43-47, 1987. |
| zein | Matzke et al |
| | Plant Mol Biol, 14(3): 323-32 1990 |
| napA | Stalberg et al, Planta 199: 515-519, 1996. |
| wheat LMW and HMW | Mol Gen Genet 216: 81-90, 1989; |
| glutenin-1 | NAR 17: 461-2, 1989 |
| wheat SPA | Albani et al, Plant Cell, 9: 171-184, 1997 |
| wheat α, β, γ-gliadins | EMBO J. 3: 1409-15, 1984 |
| barley Itr1 promoter | Diaz et al. (1995) |
| | Mol Gen Genet 248 (5): 592-8 |
| barley B1, C, | Theor Appl Gen 98: 1253-62, 1999; |
| D, hordein | Plant J 4: 343-55, 1993; |
| | Mol Gen Genet 250: 750-60, 1996 |
| barley DOF | Mena et al, The Plant Journal, |
| | 116 (1): 53-62, 1998 |
| blz2 | EP99106056.7 |
| synthetic promoter | Vicente-Carbajosa et al., |
| | Plant J. 13: 629-640, 1998. |
| rice prolamin NRP33 | Wu et al, Plant Cell |
| | Physiology 39 (8) 885-889, 1998 |
| rice α-globulin Glb-1 | Wu et al, Plant Cell |
| | Physiology 39 (8) 885-889, 1998 |
| rice OSH1 | Sato et al, Proc. Natl. Acad. |
| | Sci. USA, 93: 8117-8122, |
| | 1996 |
| rice α-globulin | Nakase et al. |
| REB/OHP-1 | Plant Mol. Biol. 33: 513-522, 1997 |
| rice ADP-glucose | Trans Res 6: 157-68, 1997 |
| pyrophos- | |
| phorylase | |
| maize ESR gene family | Plant J 12: 235-46, 1997 |
| sorghum α-kafirin | DeRose et al., Plant |
| | Mol. Biol 32: 1029-35, 1996 |
| KNOX | Postma-Haarsma et al, |
| | Plant Mol. Biol. 39: 257-71, 1999 |
| rice oleosin | Wu et al, J. Biochem. 123: 386, 1998 |
| sunflower oleosin | Cummins et al., |
| | Plant Mol. Biol. 19: 873-876, 1992 |
| PRO0117, | WO 2004/070039 |
| putative rice 40S | |
| ribosomal protein | |
| PRO0136, rice alanine | unpublished |
| aminotransferase | |
| PRO0147, | unpublished |
| trypsin inhibitor | |
| ITR1 (barley) | |
| PRO0151, rice WSI18 | WO 2004/070039 |
| PRO0175, rice RAB21 | WO 2004/070039 |
| PRO005 | WO 2004/070039 |
| PRO0095 | WO 2004/070039 |
| α-amylase | Lanahan et al, Plant Cell 4: 203-211, 1992; |
| (Amy32b) | Skriver et al, |
| | Proc Natl Acad Sci |
| | USA 88: 7266-7270, 1991 |
| cathepsin β-like gene | Cejudo et al, |
| | Plant Mol Biol 20: 849-856, 1992 |
| Barley Ltp2 | Kalla et al., Plant J. 6: 849-60, 1994 |
| Chi26 | Leah et al., Plant J. 4: 579-89, 1994 |
| Maize B-Peru | Selinger et al., |
| | Genetics 149; 1125-38, 1998 |

TABLE 2d
Examples of endosperm-specific promoters

| Gene source | Reference |
|---|---|
| glutelin (rice) | Takaiwa et al. (1986) Mol Gen Genet 208: 15-22; |
| | Takaiwa et al. (1987) FEBS Letts. 221: 43-47 |
| zein | Matzke et al., (1990) Plant Mol Biol 14(3): 323-32 |
| wheat LMW and | Colot et al. (1989) Mol Gen Genet 216: 81-90, |
| HMW glutenin-1 | Anderson et al. (1989) NAR 17: 461-2 |
| wheat SPA | Albani et al. (1997) Plant Cell 9: 171-184 |
| wheat gliadins | Rafalski et al. (1984) EMBO 3: 1409-15 |
| barley Itr1 promoter | Diaz et al. (1995) Mol Gen Genet 248(5): 592-8 |
| barley B1, | Cho et al. (1999) Theor Appl Genet 98: 1253-62; |
| C, D, hordein | Muller et al. (1993) Plant J 4: 343-55; |
| | Sorenson et al. (1996) Mol Gen Genet 250: 750-60 |
| barley DOF | Mena et al, (1998) Plant J 116(1): 53-62 |
| blz2 | Onate et al. (1999) J Biol Chem 274(14): 9175-82 |
| synthetic promoter | Vicente-Carbajosa et al. (1998) Plant J 13: 629-640 |
| rice prolamin NRP33 | Wu et al, (1998) Plant Cell Physiol 39(8) 885-889 |
| rice globulin Glb-1 | Wu et al. (1998) Plant Cell Physiol 39(8) 885-889 |
| rice globulin | Nakase et al. (1997) Plant Molec Biol 33: 513-522 |
| REB/OHP-1 | |
| rice ADP-glucose | Russell et al. (1997) Trans Res 6: 157-68 |
| pyrophosphorylase | |
| maize ESR gene | Opsahl-Ferstad et al. (1997) Plant J 12: 235-46 |
| family | |
| sorghum kafirin | DeRose et al. (1996) Plant Mol Biol 32: 1029-35 |

TABLE 2e
Examples of embryo specific promoters:

| Gene source | Reference |
|---|---|
| rice OSH1 | Sato et al, Proc. Natl. Acad. Sci. USA, 93: 8117-8122, 1996 |
| KNOX | Postma-Haarsma et al, Plant Mol. Biol. 39: 257-71, 1999 |
| PRO0151 | WO 2004/070039 |
| PRO0175 | WO 2004/070039 |
| PRO005 | WO 2004/070039 |
| PRO0095 | WO 2004/070039 |

TABLE 2f
Examples of aleurone-specific promoters:

| Gene source | Reference |
|---|---|
| α-amylase | Lanahan et al, Plant |
| (Amy32b) | Cell 4: 203-211, 1992; |
| | Skriver et al, Proc Natl |
| | Acad Sci USA 88: 7266-7270, 1991 |
| cathepsin β-like | Cejudo et al, Plant |
| gene | Mol Biol 20: 849-856, 1992 |
| Barley Ltp2 | Kalla et al., Plant J. 6: 849-60, 1994 |
| Chi26 | Leah et al., Plant J. 4: 579-89, 1994 |
| Maize B-Peru | Selinger et al., |
| | Genetics 149; 1125-38, 1998 |

[0156] A “green tissue-specific promoter” as defined herein is a promoter that is transcriptionally active predominantly in green tissue, substantially to the exclusion of any other parts of a plant, whilst still allowing for any leaky expression in these other plant parts.

[0157] Examples of green tissue-specific promoters which may be used to perform the methods of the invention are shown in Table 2g below.

TABLE 2g
Examples of green tissue-specific promoters

| Gene | Expression | Reference |
|---|---|---|
| Maize | Leaf specific | Fukavama et al., Plant Physiol. |
| Orthophosphate | | 2001 November; 127 (3): |
| dikinase | | 1136-46 |
| Maize | Leaf specific | Kausch et al., Plant Mol Biol. |
| Phosphoenolpyruvate | | 2001 January; 45 (1): 1-15 |
| carboxylase | | |
| Rice | Leaf specific | Lin et al., 2004 DNA Seq. 2004 |
| Phosphoenolpyruvate | | August; 15 (4): 269-76 |
| carboxylase | | |
| Rice small subunit | Leaf specific | Nomura et al., Plant Mol Biol. |
| Rubisco | | 2000 September; 44 (1): 99-106 |
| rice beta expansin | Shoot specific | WO 2004/070039 |
| EXBP9 | | |
| Pigeonpea | Leaf specific | Panguluri et al., Indian J Exp |
| small subunit Rubisco | | Biol. 2005 April; 43 (4): 369-72 |
| Pea RBCS3A | Leaf specific | |

[0158] Another example of a tissue-specific promoter is a meristem-specific promoter, which is transcriptionally active predominantly in meristematic tissue, substantially to the exclusion of any other parts of a plant, whilst still allowing for any leaky expression in these other plant parts. Examples of green meristem-specific promoters which may be used to perform the methods of the invention are shown in Table 2h below.

TABLE 2h
Examples of meristem-specific promoters

| Gene source | Expression pattern | Reference |
|---|---|---|
| rice OSH1 | Shoot apical meristem, | Sato et al. (1996) Proc. |
| | from embryo globular | Natl. Acad. Sci. USA, |
| | stage to seedling stage | 93: 8117-8122 |
| Rice | Meristem specific | BAD87835.1 |
| metallothionein | | |
| WAK1 & | Shoot and root apical | Wagner & Kohorn (2001) |
| WAK 2 | meristems, and in | Plant Cell 13(2): 303-318 |
| | expanding leaves and | |
| | sepals | |

### Terminator

[0159] The term “terminator” encompasses a control sequence which is a DNA sequence at the end of a transcriptional unit which signals 3′ processing and polyadenylation of a primary transcript and termination of transcription. The terminator can be derived from the natural gene, from a variety of other plant genes, or from T-DNA. The terminator to be added may be derived from, for example, the nopaline synthase or octopine synthase genes, or alternatively from another plant gene, or less preferably from any other eukaryotic gene.

### Selectable Marker (Gene)/Reporter Gene

[0160] “Selectable marker”, “selectable marker gene” or “reporter gene” includes any gene that confers a phenotype on a cell in which it is expressed to facilitate the identification and/or selection of cells that are transfected or transformed with a nucleic acid construct of the invention. These marker genes enable the identification of a successful transfer of the nucleic acid molecules via a series of different principles. Suitable markers may be selected from markers that confer antibiotic or herbicide resistance, that introduce a new metabolic trait or that allow visual selection. Examples of selectable marker genes include genes conferring resistance to antibiotics (such as nptII that phosphorylates neomycin and kanamycin, or hpt, phosphorylating hygromycin, or genes conferring resistance to, for example, bleomycin, streptomycin, tetracyclin, chloramphenicol, ampicillin, gentamycin, geneticin (G418), spectinomycin or blasticidin), to herbicides (for example bar which provides resistance to Basta®; aroA or gox providing resistance against glyphosate, or the genes conferring resistance to, for example, imidazolinone, phosphinothricin or sulfonylurea), or genes that provide a metabolic trait (such as manA that allows plants to use mannose as sole carbon source or xylose isomerase for the utilisation of xylose, or antinutritive markers such as the resistance to 2-deoxyglucose). Expression of visual marker genes results in the formation of colour (for example β-glucuronidase, GUS or β-galactosidase with its coloured substrates, for example X-Gal), luminescence (such as the luciferin/luceferase system) or fluorescence (Green Fluorescent Protein, GFP, and derivatives thereof). This list represents only a small number of possible markers. The skilled worker is familiar with such markers. Different markers are preferred, depending on the organism and the selection method.

[0161] It is known that upon stable or transient integration of nucleic acids into plant cells, only a minority of the cells takes up the foreign DNA and, if desired, integrates it into its genome, depending on the expression vector used and the transfection technique used. To identify and select these integrants, a gene coding for a selectable marker (such as the ones described above) is usually introduced into the host cells together with the gene of interest. These markers can for example be used in mutants in which these genes are not functional by, for example, deletion by conventional methods. Furthermore, nucleic acid molecules encoding a selectable marker can be introduced into a host cell on the same vector that comprises the sequence encoding the polypeptides of the invention or used in the methods of the invention, or else in a separate vector. Cells which have been stably transfected with the introduced nucleic acid can be identified for example by selection (for example, cells which have integrated the selectable marker survive whereas the other cells die).

[0162] Since the marker genes, particularly genes for resistance to antibiotics and herbicides, are no longer required or are undesired in the transgenic host cell once the nucleic acids have been introduced successfully, the process according to the invention for introducing the nucleic acids advantageously employs techniques which enable the removal or excision of these marker genes. One such a method is what is known as co-transformation. The co-transformation method employs two vectors simultaneously for the transformation, one vector bearing the nucleic acid according to the invention and a second bearing the marker gene(s). A large proportion of transformants receives or, in the case of plants, comprises (up to 40% or more of the transformants), both vectors. In case of transformation with Agrobacteria, the transformants usually receive only a part of the vector, i.e. the sequence flanked by the T-DNA, which usually represents the expression cassette. The marker genes can subsequently be removed from the transformed plant by performing crosses. In another method, marker genes integrated into a transposon are used for the transformation together with desired nucleic acid (known as the Ac/Ds technology). The transformants can be crossed with a transposase source or the transformants are transformed with a nucleic acid construct conferring expression of a transposase, transiently or stable. In some cases (approx. 10%), the transposon jumps out of the genome of the host cell once transformation has taken place successfully and is lost. In a further number of cases, the transposon jumps to a different location. In these cases the marker gene must be eliminated by performing crosses. In microbiology, techniques were developed which make possible, or facilitate, the detection of such events. A further advantageous method relies on what is known as recombination systems; whose advantage is that elimination by crossing can be dispensed with. The best-known system of this type is what is known as the Cre/Iox system. Cre1 is a recombinase that removes the sequences located between the IoxP sequences. If the marker gene is integrated between the IoxP sequences, it is removed once transformation has taken place successfully, by expression of the recombinase. Further recombination systems are the HIN/HIX, FLP/FRT and REP/STB system (Tribble et al., J. Biol. Chem., 275, 2000: 22255-22267; Velmurugan et al., J. Cell Biol., 149, 2000: 553-566). A site-specific integration into the plant genome of the nucleic acid sequences according to the invention is possible. Naturally, these methods can also be applied to microorganisms such as yeast, fungi or bacteria.

### Transgenic/Transgene/Recombinant

[0163] For the purposes of the invention, “transgenic”, “transgene” or “recombinant” means with regard to, for example, a nucleic acid sequence, an expression cassette, gene construct or a vector comprising the nucleic acid sequence or an organism transformed with the nucleic acid sequences, expression cassettes or vectors according to the invention, all those constructions brought about by recombinant methods in which either
[0164] (a) the nucleic acid sequences encoding proteins useful in the methods of the invention, or
[0165] (b) genetic control sequence(s) which is operably linked with the nucleic acid sequence according to the invention, for example a promoter, or
[0166] (c) a) and b)
   are not located in their natural genetic environment or have been modified by recombinant methods, it being possible for the modification to take the form of, for example, a substitution, addition, deletion, inversion or insertion of one or more nucleotide residues. The natural genetic environment is understood as meaning the natural genomic or chromosomal locus in the original plant or the presence in a genomic library. In the case of a genomic library, the natural genetic environment of the nucleic acid sequence is preferably retained, at least in part. The environment flanks the nucleic acid sequence at least on one side and has a sequence length of at least 50 bp, preferably at least 500 bp, especially preferably at least 1000 bp, most preferably at least 5000 bp. A naturally occurring expression cassette—for example the naturally occurring combination of the natural promoter of the nucleic acid sequences with the corresponding nucleic acid sequence encoding a polypeptide useful in the methods of the present invention, as defined above—becomes a transgenic expression cassette when this expression cassette is modified by non-natural, synthetic (“artificial”) methods such as, for example, mutagenic treatment. Suitable methods are described, for example, in U.S. Pat. No. 5,565,350 or WO 00/15815.

[0167] A transgenic plant for the purposes of the invention is thus understood as meaning, as above, that the nucleic acids used in the method of the invention are not present in, or originating from, the genome of said plant, or are present in the genome of said plant but not at their natural locus in the genome of said plant, it being possible for the nucleic acids to be expressed homologously or heterologously. However, as mentioned, transgenic also means that, while the nucleic acids according to the invention or used in the inventive method are at their natural position in the genome of a plant, the sequence has been modified with regard to the natural sequence, and/or that the regulatory sequences of the natural sequences have been modified. Transgenic is preferably understood as meaning the expression of the nucleic acids according to the invention at an unnatural locus in the genome, i.e. homologous or, preferably, heterologous expression of the nucleic acids takes place. Preferred transgenic plants are mentioned herein.

[0168] It shall further be noted that in the context of the present invention, the term “isolated nucleic acid” or “isolated polypeptide” may in some instances be considered as a synonym for a “recombinant nucleic acid” or a “recombinant polypeptide”, respectively and refers to a nucleic acid or polypeptide that is not located in its natural genetic environment and/or that has been modified by recombinant methods.

### Modulation

[0169] The term “modulation” means in relation to expression or gene expression, a process in which the expression level is changed by said gene expression in comparison to the control plant, the expression level may be increased or decreased. The original, unmodulated expression may be of any kind of expression of a structural RNA (rRNA, tRNA) or mRNA with subsequent translation. For the purposes of this invention, the original unmodulated expression may also be absence of any expression. The term “modulating the activity” shall mean any change of the expression of the inventive nucleic acid sequences or encoded proteins, which leads to increased yield and/or increased growth of the plants. The expression can increase from zero (absence of, or immeasurable expression) to a certain amount, or can decrease from a certain amount to immeasurable small amounts or zero.

### Expression

[0170] The term “expression” or “gene expression” means the transcription of a specific gene or specific genes or specific genetic construct. The term “expression” or “gene expression” in particular means the transcription of a gene or genes or genetic construct into structural RNA (rRNA, tRNA) or mRNA with or without subsequent translation of the latter into a protein. The process includes transcription of DNA and processing of the resulting mRNA product.

### Increased Expression/Overexpression

[0171] The term “increased expression” or “overexpression” as used herein means any form of expression that is additional to the original wild-type expression level. For the purposes of this invention, the original wild-type expression level might also be zero, i.e. absence of expression or immeasurable expression.

[0172] Methods for increasing expression of genes or gene products are well documented in the art and include, for example, overexpression driven by appropriate promoters, the use of transcription enhancers or translation enhancers. Isolated nucleic acids which serve as promoter or enhancer elements may be introduced in an appropriate position (typically upstream) of a non-heterologous form of a polynucleotide so as to upregulate expression of a nucleic acid encoding the polypeptide of interest. For example, endogenous promoters may be altered in vivo by mutation, deletion, and/or substitution (see, Kmiec, U.S. Pat. No. 5,565,350; Zarling et al., WO9322443), or isolated promoters may be introduced into a plant cell in the proper orientation and distance from a gene of the present invention so as to control the expression of the gene.

[0173] If polypeptide expression is desired, it is generally desirable to include a polyadenylation region at the 3′-end of a polynucleotide coding region. The polyadenylation region can be derived from the natural gene, from a variety of other plant genes, or from T-DNA. The 3′ end sequence to be added may be derived from, for example, the nopaline synthase or octopine synthase genes, or alternatively from another plant gene, or less preferably from any other eukaryotic gene.

[0174] An intron sequence may also be added to the 5′ untranslated region (UTR) or the coding sequence of the partial coding sequence to increase the amount of the mature message that accumulates in the cytosol. Inclusion of a spliceable intron in the transcription unit in both plant and animal expression constructs has been shown to increase gene expression at both the mRNA and protein levels up to 1000-fold (Buchman and Berg (1988) Mol. Cell biol. 8: 4395-4405; Callis et al. (1987) Genes Dev 1:1183-1200). Such intron enhancement of gene expression is typically greatest when placed near the 5′ end of the transcription unit. Use of the maize introns Adh1-S intron 1, 2, and 6, the Bronze-1 intron are known in the art. For general information see: The Maize Handbook, Chapter 116, Freeling and Walbot, Eds., Springer, N.Y. (1994).

### Decreased Expression

[0175] Reference herein to “decreased expression” or “reduction or substantial elimination” of expression is taken to mean a decrease in endogenous gene expression and/or polypeptide levels and/or polypeptide activity relative to control plants. The reduction or substantial elimination is in increasing order of preference at least 10%, 20%, 30%, 40% or 50%, 60%, 70%, 80%, 85%, 90%, or 95%, 96%, 97%, 98%, 99% or more reduced compared to that of control plants.

[0176] For the reduction or substantial elimination of expression an endogenous gene in a plant, a sufficient length of substantially contiguous nucleotides of a nucleic acid sequence is required. In order to perform gene silencing, this may be as little as 20, 19, 18, 17, 16, 15, 14, 13, 12, 11, 10 or fewer nucleotides, alternatively this may be as much as the entire gene (including the 5′ and/or 3′ UTR, either in part or in whole). The stretch of substantially contiguous nucleotides may be derived from the nucleic acid encoding the protein of interest (target gene), or from any nucleic acid capable of encoding an orthologue, paralogue or homologue of the protein of interest. Preferably, the stretch of substantially contiguous nucleotides is capable of forming hydrogen bonds with the target gene (either sense or antisense strand), more preferably, the stretch of substantially contiguous nucleotides has, in increasing order of preference, 50%, 60%, 70%, 80%, 85%, 90%, 95%, 96%, 97%, 98%, 99%, 100% sequence identity to the target gene (either sense or antisense strand). A nucleic acid sequence encoding a (functional) polypeptide is not a requirement for the various methods discussed herein for the reduction or substantial elimination of expression of an endogenous gene.

[0177] This reduction or substantial elimination of expression may be achieved using routine tools and techniques. A preferred method for the reduction or substantial elimination of endogenous gene expression is by introducing and expressing in a plant a genetic construct into which the nucleic acid (in this case a stretch of substantially contiguous nucleotides derived from the gene of interest, or from any nucleic acid capable of encoding an orthologue, paralogue or homologue of any one of the protein of interest) is cloned as an inverted repeat (in part or completely), separated by a spacer (non-coding DNA).

[0178] In such a preferred method, expression of the endogenous gene is reduced or substantially eliminated through RNA-mediated silencing using an inverted repeat of a nucleic acid or a part thereof (in this case a stretch of substantially contiguous nucleotides derived from the gene of interest, or from any nucleic acid capable of encoding an orthologue, paralogue or homologue of the protein of interest), preferably capable of forming a hairpin structure. The inverted repeat is cloned in an expression vector comprising control sequences. A non-coding DNA nucleic acid sequence (a spacer, for example a matrix attachment region fragment (MAR), an intron, a polylinker, etc.) is located between the two inverted nucleic acids forming the inverted repeat. After transcription of the inverted repeat, a chimeric RNA with a self-complementary structure is formed (partial or complete). This double-stranded RNA structure is referred to as the hairpin RNA (hpRNA). The hpRNA is processed by the plant into siRNAs that are incorporated into an RNA-induced silencing complex (RISC). The RISC further cleaves the mRNA transcripts, thereby substantially reducing the number of mRNA transcripts to be translated into polypeptides. For further general details see for example, Grierson et al. (1998) WO 98/53083; Waterhouse et al. (1999) WO 99/53050).

[0179] Performance of the methods of the invention does not rely on introducing and expressing in a plant a genetic construct into which the nucleic acid is cloned as an inverted repeat, but any one or more of several well-known “gene silencing” methods may be used to achieve the same effects.

[0180] One such method for the reduction of endogenous gene expression is RNA-mediated silencing of gene expression (downregulation). Silencing in this case is triggered in a plant by a double stranded RNA sequence (dsRNA) that is substantially similar to the target endogenous gene. This dsRNA is further processed by the plant into about 20 to about 26 nucleotides called short interfering RNAs (siRNAs). The siRNAs are incorporated into an RNA-induced silencing complex (RISC) that cleaves the mRNA transcript of the endogenous target gene, thereby substantially reducing the number of mRNA transcripts to be translated into a polypeptide. Preferably, the double stranded RNA sequence corresponds to a target gene.

[0181] Another example of an RNA silencing method involves the introduction of nucleic acid sequences or parts thereof (in this case a stretch of substantially contiguous nucleotides derived from the gene of interest, or from any nucleic acid capable of encoding an orthologue, paralogue or homologue of the protein of interest) in a sense orientation into a plant. “Sense orientation” refers to a DNA sequence that is homologous to an mRNA transcript thereof. Introduced into a plant would therefore be at least one copy of the nucleic acid sequence. The additional nucleic acid sequence will reduce expression of the endogenous gene, giving rise to a phenomenon known as co-suppression. The reduction of gene expression will be more pronounced if several additional copies of a nucleic acid sequence are introduced into the plant, as there is a positive correlation between high transcript levels and the triggering of co-suppression.

[0182] Another example of an RNA silencing method involves the use of antisense nucleic acid sequences. An “antisense” nucleic acid sequence comprises a nucleotide sequence that is complementary to a “sense” nucleic acid sequence encoding a protein, i.e. complementary to the coding strand of a double-stranded cDNA molecule or complementary to an mRNA transcript sequence. The antisense nucleic acid sequence is preferably complementary to the endogenous gene to be silenced. The complementarity may be located in the “coding region” and/or in the “non-coding region” of a gene. The term “coding region” refers to a region of the nucleotide sequence comprising codons that are translated into amino acid residues. The term “non-coding region” refers to 5′ and 3′ sequences that flank the coding region that are transcribed but not translated into amino acids (also referred to as 5′ and 3′ untranslated regions).

[0183] Antisense nucleic acid sequences can be designed according to the rules of Watson and Crick base pairing. The antisense nucleic acid sequence may be complementary to the entire nucleic acid sequence (in this case a stretch of substantially contiguous nucleotides derived from the gene of interest, or from any nucleic acid capable of encoding an orthologue, paralogue or homologue of the protein of interest), but may also be an oligonucleotide that is antisense to only a part of the nucleic acid sequence (including the mRNA 5′ and 3′ UTR). For example, the antisense oligonucleotide sequence may be complementary to the region surrounding the translation start site of an mRNA transcript encoding a polypeptide. The length of a suitable antisense oligonucleotide sequence is known in the art and may start from about 50, 45, 40, 35, 30, 25, 20, 15 or 10 nucleotides in length or less. An antisense nucleic acid sequence according to the invention may be constructed using chemical synthesis and enzymatic ligation reactions using methods known in the art. For example, an antisense nucleic acid sequence (e.g., an antisense oligonucleotide sequence) may be chemically synthesized using naturally occurring nucleotides or variously modified nucleotides designed to increase the biological stability of the molecules or to increase the physical stability of the duplex formed between the antisense and sense nucleic acid sequences, e.g., phosphorothioate derivatives and acridine substituted nucleotides may be used. Examples of modified nucleotides that may be used to generate the antisense nucleic acid sequences are well known in the art. Known nucleotide modifications include methylation, cyclization and ‘caps’ and substitution of one or more of the naturally occurring nucleotides with an analogue such as inosine. Other modifications of nucleotides are well known in the art.

[0184] The antisense nucleic acid sequence can be produced biologically using an expression vector into which a nucleic acid sequence has been subcloned in an antisense orientation (i.e., RNA transcribed from the inserted nucleic acid will be of an antisense orientation to a target nucleic acid of interest). Preferably, production of antisense nucleic acid sequences in plants occurs by means of a stably integrated nucleic acid construct comprising a promoter, an operably linked antisense oligonucleotide, and a terminator.

[0185] The nucleic acid molecules used for silencing in the methods of the invention (whether introduced into a plant or generated in situ) hybridize with or bind to mRNA transcripts and/or genomic DNA encoding a polypeptide to thereby inhibit expression of the protein, e.g., by inhibiting transcription and/or translation. The hybridization can be by conventional nucleotide complementarity to form a stable duplex, or, for example, in the case of an antisense nucleic acid sequence which binds to DNA duplexes, through specific interactions in the major groove of the double helix. Antisense nucleic acid sequences may be introduced into a plant by transformation or direct injection at a specific tissue site. Alternatively, antisense nucleic acid sequences can be modified to target selected cells and then administered systemically. For example, for systemic administration, antisense nucleic acid sequences can be modified such that they specifically bind to receptors or antigens expressed on a selected cell surface, e.g., by linking the antisense nucleic acid sequence to peptides or antibodies which bind to cell surface receptors or antigens. The antisense nucleic acid sequences can also be delivered to cells using the vectors described herein.

[0186] According to a further aspect, the antisense nucleic acid sequence is an a-anomeric nucleic acid sequence. An a-anomeric nucleic acid sequence forms specific double-stranded hybrids with complementary RNA in which, contrary to the usual b-units, the strands run parallel to each other (Gaultier et al. (1987) Nucl Ac Res 15: 6625-6641). The antisense nucleic acid sequence may also comprise a 2′-o-methylribonucleotide (Inoue et al. (1987) Nucl Ac Res 15, 6131-6148) or a chimeric RNA-DNA analogue (Inoue et al. (1987) FEBS Lett. 215, 327-330).

[0187] The reduction or substantial elimination of endogenous gene expression may also be performed using ribozymes. Ribozymes are catalytic RNA molecules with ribonuclease activity that are capable of cleaving a single-stranded nucleic acid sequence, such as an mRNA, to which they have a complementary region. Thus, ribozymes (e.g., hammerhead ribozymes (described in Haselhoff and Gerlach (1988) Nature 334, 585-591) can be used to catalytically cleave mRNA transcripts encoding a polypeptide, thereby substantially reducing the number of mRNA transcripts to be translated into a polypeptide. A ribozyme having specificity for a nucleic acid sequence can be designed (see for example: Cech et al. U.S. Pat. No. 4,987,071; and Cech et al. U.S. Pat. No. 5,116,742). Alternatively, mRNA transcripts corresponding to a nucleic acid sequence can be used to select a catalytic RNA having a specific ribonuclease activity from a pool of RNA molecules (Bartel and Szostak (1993) Science 261, 1411-1418). The use of ribozymes for gene silencing in plants is known in the art (e.g., Atkins et al. (1994) WO 94/00012; Lenne et al. (1995) WO 95/03404; Lutziger et al. (2000) WO 00/00619; Prinsen et al. (1997) WO 97/13865 and Scott et al. (1997) WO 97/38116).

[0188] Gene silencing may also be achieved by insertion mutagenesis (for example, T-DNA insertion or transposon insertion) or by strategies as described by, among others, Angell and Baulcombe ((1999) Plant J 20(3): 357-62), (Amplicon VIGS WO 98/36083), or Baulcombe (WO 99/15682).

[0189] Gene silencing may also occur if there is a mutation on an endogenous gene and/or a mutation on an isolated gene/nucleic acid subsequently introduced into a plant. The reduction or substantial elimination may be caused by a non-functional polypeptide. For example, the polypeptide may bind to various interacting proteins; one or more mutation(s) and/or truncation(s) may therefore provide for a polypeptide that is still able to bind interacting proteins (such as receptor proteins) but that cannot exhibit its normal function (such as signalling ligand).

[0190] A further approach to gene silencing is by targeting nucleic acid sequences complementary to the regulatory region of the gene (e.g., the promoter and/or enhancers) to form triple helical structures that prevent transcription of the gene in target cells. See Helene, C., Anticancer Drug Res. 6, 569-84, 1991; Helene et al., Ann. N.Y. Acad. Sci. 660, 27-36 1992; and Maher, L. J. Bioassays 14, 807-15, 1992.

[0191] Other methods, such as the use of antibodies directed to an endogenous polypeptide for inhibiting its function in planta, or interference in the signalling pathway in which a polypeptide is involved, will be well known to the skilled man. In particular, it can be envisaged that manmade molecules may be useful for inhibiting the biological function of a target polypeptide, or for interfering with the signalling pathway in which the target polypeptide is involved.

[0192] Alternatively, a screening program may be set up to identify in a plant population natural variants of a gene, which variants encode polypeptides with reduced activity. Such natural variants may also be used for example, to perform homologous recombination.

[0193] Artificial and/or natural microRNAs (miRNAs) may be used to knock out gene expression and/or mRNA translation. Endogenous miRNAs are single stranded small RNAs of typically 19-24 nucleotides long. They function primarily to regulate gene expression and/or mRNA translation. Most plant microRNAs (miRNAs) have perfect or near-perfect complementarity with their target sequences. However, there are natural targets with up to five mismatches. They are processed from longer non-coding RNAs with characteristic fold-back structures by double-strand specific RNases of the Dicer family. Upon processing, they are incorporated in the RNA-induced silencing complex (RISC) by binding to its main component, an Argonaute protein. MiRNAs serve as the specificity components of RISC, since they base-pair to target nucleic acids, mostly mRNAs, in the cytoplasm. Subsequent regulatory events include target mRNA cleavage and destruction and/or translational inhibition. Effects of miRNA overexpression are thus often reflected in decreased mRNA levels of target genes.

[0194] Artificial microRNAs (amiRNAs), which are typically 21 nucleotides in length, can be genetically engineered specifically to negatively regulate gene expression of single or multiple genes of interest. Determinants of plant microRNA target selection are well known in the art. Empirical parameters for target recognition have been defined and can be used to aid in the design of specific amiRNAs, (Schwab et al., Dev. Cell 8, 517-527, 2005). Convenient tools for design and generation of amiRNAs and their precursors are also available to the public (Schwab et al., Plant Cell 18, 1121-1133, 2006).

[0195] For optimal performance, the gene silencing techniques used for reducing expression in a plant of an endogenous gene requires the use of nucleic acid sequences from monocotyledonous plants for transformation of monocotyledonous plants, and from dicotyledonous plants for transformation of dicotyledonous plants. Preferably, a nucleic acid sequence from any given plant species is introduced into that same species. For example, a nucleic acid sequence from rice is transformed into a rice plant. However, it is not an absolute requirement that the nucleic acid sequence to be introduced originates from the same plant species as the plant in which it will be introduced. It is sufficient that there is substantial homology between the endogenous target gene and the nucleic acid to be introduced.

[0196] Described above are examples of various methods for the reduction or substantial elimination of expression in a plant of an endogenous gene. A person skilled in the art would readily be able to adapt the aforementioned methods for silencing so as to achieve reduction of expression of an endogenous gene in a whole plant or in parts thereof through the use of an appropriate promoter, for example.

### Transformation

[0197] The term “introduction” or “transformation” as referred to herein encompasses the transfer of an exogenous polynucleotide into a host cell, irrespective of the method used for transfer. Plant tissue capable of subsequent clonal propagation, whether by organogenesis or embryogenesis, may be transformed with a genetic construct of the present invention and a whole plant regenerated there from. The particular tissue chosen will vary depending on the clonal propagation systems available for, and best suited to, the particular species being transformed. Exemplary tissue targets include leaf disks, pollen, embryos, cotyledons, hypocotyls, megagametophytes, callus tissue, existing meristematic tissue (e.g., apical meristem, axillary buds, and root meristems), and induced meristem tissue (e.g., cotyledon meristem and hypocotyl meristem). The polynucleotide may be transiently or stably introduced into a host cell and may be maintained non-integrated, for example, as a plasmid. Alternatively, it may be integrated into the host genome. The resulting transformed plant cell may then be used to regenerate a transformed plant in a manner known to persons skilled in the art. Alternatively, a plant cell that cannot be regenerated into a plant may be chosen as host cell, i.e. the resulting transformed plant cell does not have the capacity to regenerate into a (whole) plant.

[0198] The transfer of foreign genes into the genome of a plant is called transformation. Transformation of plant species is now a fairly routine technique. Advantageously, any of several transformation methods may be used to introduce the gene of interest into a suitable ancestor cell. The methods described for the transformation and regeneration of plants from plant tissues or plant cells may be utilized for transient or for stable transformation. Transformation methods include the use of liposomes, electroporation, chemicals that increase free DNA uptake, injection of the DNA directly into the plant, particle gun bombardment, transformation using viruses or pollen and microprojection. Methods may be selected from the calcium/polyethylene glycol method for protoplasts (Krens, F. A. et al., (1982) Nature 296, 72-74; Negrutiu I et al. (1987) Plant Mol Biol 8: 363-373); electroporation of protoplasts (Shillito R. D. et al. (1985) Bio/Technol 3, 1099-1102); microinjection into plant material (Crossway A et al., (1986) Mol. Gen Genet 202: 179-185); DNA or RNA-coated particle bombardment (Klein T M et al., (1987) Nature 327: 70) infection with (non-integrative) viruses and the like. Transgenic plants, including transgenic crop plants, are preferably produced via Agrobacterium-mediated transformation. An advantageous transformation method is the transformation in planta. To this end, it is possible, for example, to allow the agrobacteria to act on plant seeds or to inoculate the plant meristem with agrobacteria. It has proved particularly expedient in accordance with the invention to allow a suspension of transformed agrobacteria to act on the intact plant or at least on the flower primordia. The plant is subsequently grown on until the seeds of the treated plant are obtained (Clough and Bent, Plant J. (1998) 16, 735-743). Methods for Agrobacterium-mediated transformation of rice include well known methods for rice transformation, such as those described in any of the following: European patent application EP 1198985 A1, Aldemita and Hodges (Planta 199: 612-617, 1996); Chan et al. (Plant Mol Biol 22 (3): 491-506, 1993), Hiei et al. (Plant J 6 (2): 271-282, 1994), which disclosures are incorporated by reference herein as if fully set forth. In the case of corn transformation, the preferred method is as described in either Ishida et al. (Nat. Biotechnol 14(6): 745-50, 1996) or Frame et al. (Plant Physiol 129(1): 13-22, 2002), which disclosures are incorporated by reference herein as if fully set forth. Said methods are further described by way of example in B. Jenes et al., Techniques for Gene Transfer, in: Transgenic Plants, Vol. 1, Engineering and Utilization, eds. S. D. Kung and R. Wu, Academic Press (1993) 128-143 and in Potrykus Annu. Rev. Plant Physiol. Plant Molec. Biol. 42 (1991) 205-225). The nucleic acids or the construct to be expressed is preferably cloned into a vector, which is suitable for transforming Agrobacterium tumefaciens, for example pBin19 (Bevan et al., Nucl. Acids Res. 12 (1984) 8711). Agrobacteria transformed by such a vector can then be used in known manner for the transformation of plants, such as plants used as a model, like Arabidopsis (Arabidopsis thaliana is within the scope of the present invention not considered as a crop plant), or crop plants such as, by way of example, tobacco plants, for example by immersing bruised leaves or chopped leaves in an agrobacterial solution and then culturing them in suitable media. The transformation of plants by means of Agrobacterium tumefaciens is described, for example, by Hofgen and Willmitzer in Nucl. Acid Res. (1988) 16, 9877 or is known inter alia from F. F. White, Vectors for Gene Transfer in Higher Plants; in Transgenic Plants, Vol. 1, Engineering and Utilization, eds. S. D. Kung and R. Wu, Academic Press, 1993, pp. 15-38.

[0199] In addition to the transformation of somatic cells, which then have to be regenerated into intact plants, it is also possible to transform the cells of plant meristems and in particular those cells which develop into gametes. In this case, the transformed gametes follow the natural plant development, giving rise to transgenic plants. Thus, for example, seeds of Arabidopsis are treated with agrobacteria and seeds are obtained from the developing plants of which a certain proportion is transformed and thus transgenic [Feldman, K A and Marks M D (1987). Mol Gen Genet 208:1-9; Feldmann K (1992). In: C Koncz, N-H Chua and J Shell, eds, Methods in Arabidopsis Research. Word Scientific, Singapore, pp. 274-289]. Alternative methods are based on the repeated removal of the inflorescences and incubation of the excision site in the center of the rosette with transformed agrobacteria, whereby transformed seeds can likewise be obtained at a later point in time (Chang (1994). Plant J. 5: 551-558; Katavic (1994). Mol Gen Genet, 245: 363-370). However, an especially effective method is the vacuum infiltration method with its modifications such as the “floral dip” method. In the case of vacuum infiltration of Arabidopsis, intact plants under reduced pressure are treated with an agrobacterial suspension [Bechthold, N (1993). C R Acad Sci Paris Life Sci, 316: 1194-1199], while in the case of the “floral dip” method the developing floral tissue is incubated briefly with a surfactant-treated agrobacterial suspension [Clough, S J and Bent A F (1998) The Plant J. 16, 735-743]. A certain proportion of transgenic seeds are harvested in both cases, and these seeds can be distinguished from non-transgenic seeds by growing under the above-described selective conditions. In addition the stable transformation of plastids is of advantages because plastids are inherited maternally is most crops reducing or eliminating the risk of transgene flow through pollen. The transformation of the chloroplast genome is generally achieved by a process which has been schematically displayed in Klaus et al., 2004 [Nature Biotechnology 22 (2), 225-229]. Briefly the sequences to be transformed are cloned together with a selectable marker gene between flanking sequences homologous to the chloroplast genome. These homologous flanking sequences direct site specific integration into the plastome. Plastidal transformation has been described for many different plant species and an overview is given in Bock (2001) Transgenic plastids in basic research and plant biotechnology. J Mol Biol. 2001 Sep. 21; 312 (3):425-38 or Maliga, P (2003) Progress towards commercialization of plastid transformation technology. Trends Biotechnol. 21, 20-28. Further biotechnological progress has recently been reported in form of marker free plastid transformants, which can be produced by a transient co-integrated maker gene (Klaus et al., 2004, Nature Biotechnology 22(2), 225-229).

[0200] The genetically modified plant cells can be regenerated via all methods with which the skilled worker is familiar. Suitable methods can be found in the abovementioned publications by S. D. Kung and R. Wu, Potrykus or Hofgen and Willmitzer. Alternatively, the genetically modified plant cells are non-regenerable into a whole plant.

[0201] Generally after transformation, plant cells or cell groupings are selected for the presence of one or more markers which are encoded by plant-expressible genes co-transferred with the gene of interest, following which the transformed material is regenerated into a whole plant. To select transformed plants, the plant material obtained in the transformation is, as a rule, subjected to selective conditions so that transformed plants can be distinguished from untransformed plants. For example, the seeds obtained in the above-described manner can be planted and, after an initial growing period, subjected to a suitable selection by spraying. A further possibility consists in growing the seeds, if appropriate after sterilization, on agar plates using a suitable selection agent so that only the transformed seeds can grow into plants. Alternatively, the transformed plants are screened for the presence of a selectable marker such as the ones described above.

[0202] Following DNA transfer and regeneration, putatively transformed plants may also be evaluated, for instance using Southern analysis, for the presence of the gene of interest, copy number and/or genomic organisation. Alternatively or additionally, expression levels of the newly introduced DNA may be monitored using Northern and/or Western analysis, both techniques being well known to persons having ordinary skill in the art.

[0203] The generated transformed plants may be propagated by a variety of means, such as by clonal propagation or classical breeding techniques. For example, a first generation (or T1) transformed plant may be selfed and homozygous second-generation (or T2) transformants selected, and the T2 plants may then further be propagated through classical breeding techniques. The generated transformed organisms may take a variety of forms. For example, they may be chimeras of transformed cells and non-transformed cells; clonal transformants (e.g., all cells transformed to contain the expression cassette); grafts of transformed and untransformed tissues (e.g., in plants, a transformed rootstock grafted to an untransformed scion).

### T-DNA Activation Tagging

[0204] “T-DNA activation” tagging (Hayashi et al. Science (1992) 1350-1353), involves insertion of T-DNA, usually containing a promoter (may also be a translation enhancer or an intron), in the genomic region of the gene of interest or 10 kb up- or downstream of the coding region of a gene in a configuration such that the promoter directs expression of the targeted gene. Typically, regulation of expression of the targeted gene by its natural promoter is disrupted and the gene falls under the control of the newly introduced promoter. The promoter is typically embedded in a T-DNA. This T-DNA is randomly inserted into the plant genome, for example, through Agrobacterium infection and leads to modified expression of genes near the inserted T-DNA. The resulting transgenic plants show dominant phenotypes due to modified expression of genes close to the introduced promoter.

### TILLING

[0205] The term “TILLING” is an abbreviation of “Targeted Induced Local Lesions In Genomes” and refers to a mutagenesis technology useful to generate and/or identify nucleic acids encoding proteins with modified expression and/or activity. TILLING also allows selection of plants carrying such mutant variants. These mutant variants may exhibit modified expression, either in strength or in location or in timing (if the mutations affect the promoter for example). These mutant variants may exhibit higher activity than that exhibited by the gene in its natural form. TILLING combines high-density mutagenesis with high-throughput screening methods. The steps typically followed in TILLING are: (a) EMS mutagenesis (Redei G P and Koncz C (1992) In Methods in Arabidopsis Research, Koncz C, Chua N H, Schell J, eds. Singapore, World Scientific Publishing Co, pp. 16-82; Feldmann et al., (1994) In Meyerowitz E M, Somerville C R, eds, Arabidopsis. Cold Spring Harbor Laboratory Press, Cold Spring Harbor, N.Y., pp 137-172; Lightner J and Caspar T (1998) In J Martinez-Zapater, J Salinas, eds, Methods on Molecular Biology, Vol. 82. Humana Press, Totowa, N.J., pp 91-104); (b) DNA preparation and pooling of individuals; (c) PCR amplification of a region of interest; (d) denaturation and annealing to allow formation of heteroduplexes; (e) DHPLC, where the presence of a heteroduplex in a pool is detected as an extra peak in the chromatogram; (f) identification of the mutant individual; and (g) sequencing of the mutant PCR product. Methods for TILLING are well known in the art (McCallum et al., (2000) Nat Biotechnol 18: 455-457; reviewed by Stemple (2004) Nat Rev Genet 5(2): 145-50).

### Homologous Recombination

[0206] “Homologous recombination” allows introduction in a genome of a selected nucleic acid at a defined selected position. Homologous recombination is a standard technology used routinely in biological sciences for lower organisms such as yeast or the moss Physcomitrella. Methods for performing homologous recombination in plants have been described not only for model plants (Offringa et al. (1990) EMBO J 9(10): 3077-84) but also for crop plants, for example rice (Terada et al. (2002) Nat Biotech 20(10): 1030-4; lida and Terada (2004) Curr Opin Biotech 15(2): 132-8), and approaches exist that are generally applicable regardless of the target organism (Miller et al, Nature Biotechnol. 25, 778-785, 2007).

### Yield Related Trait(s)

[0207] A “Yield related trait” is a trait or feature which is related to plant yield. Yield-related traits may comprise one or more of the following non-limitative list of features: early flowering time, yield, biomass, seed yield, early vigour, greenness index, growth rate, agronomic traits, such as e.g. tolerance to submergence (which leads to yield in rice), Water Use Efficiency (WUE), Nitrogen Use Efficiency (NUE), etc.

[0208] Reference herein to enhanced yield-related traits, relative to of control plants is taken to mean one or more of an increase in early vigour and/or in biomass (weight) of one or more parts of a plant, which may include (i) aboveground parts and preferably aboveground harvestable parts and/or (ii) parts below ground and preferably harvestable below ground. In particular, such harvestable parts are seeds.

### Yield

[0209] The term “yield” in general means a measurable produce of economic value, typically related to a specified crop, to an area, and to a period of time. Individual plant parts directly contribute to yield based on their number, size and/or weight, or the actual yield is the yield per square meter for a crop and year, which is determined by dividing total production (includes both harvested and appraised production) by planted square meters.

[0210] The terms “yield” of a plant and “plant yield” are used interchangeably herein and are meant to refer to vegetative biomass such as root and/or shoot biomass, to reproductive organs, and/or to propagules such as seeds of that plant.

[0211] Flowers in maize are unisexual; male inflorescences (tassels) originate from the apical stem and female inflorescences (ears) arise from axillary bud apices. The female inflorescence produces pairs of spikelets on the surface of a central axis (cob). Each of the female spikelets encloses two fertile florets, one of them will usually mature into a maize kernel once fertilized. Hence a yield increase in maize may be manifested as one or more of the following: increase in the number of plants established per square meter, an increase in the number of ears per plant, an increase in the number of rows, number of kernels per row, kernel weight, thousand kernel weight, ear length/diameter, increase in the seed filling rate, which is the number of filled florets (i.e. florets containing seed) divided by the total number of florets and multiplied by 100), among others.

[0212] Inflorescences in rice plants are named panicles. The panicle bears spikelets, which are the basic units of the panicles, and which consist of a pedicel and a floret. The floret is borne on the pedicel and includes a flower that is covered by two protective glumes: a larger glume (the lemma) and a shorter glume (the palea). Hence, taking rice as an example, a yield increase may manifest itself as an increase in one or more of the following: number of plants per square meter, number of panicles per plant, panicle length, number of spikelets per panicle, number of flowers (or florets) per panicle; an increase in the seed filling rate which is the number of filled florets (i.e. florets containing seeds) divided by the total number of florets and multiplied by 100; an increase in thousand kernel weight, among others.

### Early Flowering Time

[0213] Plants having an “early flowering time” as used herein are plants which start to flower earlier than control plants. Hence this term refers to plants that show an earlier start of flowering. Flowering time of plants can be assessed by counting the number of days (“time to flower”) between sowing and the emergence of a first inflorescence. The “flowering time” of a plant can for instance be determined using the method as described in WO 2007/093444.

### Early Vigour

[0214] “Early vigour” refers to active healthy well-balanced growth especially during early stages of plant growth, and may result from increased plant fitness due to, for example, the plants being better adapted to their environment (i.e. optimizing the use of energy resources and partitioning between shoot and root). Plants having early vigour also show increased seedling survival and a better establishment of the crop, which often results in highly uniform fields (with the crop growing in uniform manner, i.e. with the majority of plants reaching the various stages of development at substantially the same time), and often better and higher yield. Therefore, early vigour may be determined by measuring various factors, such as thousand kernel weight, percentage germination, percentage emergence, seedling growth, seedling height, root length, root and shoot biomass and many more.

### Increased Growth Rate

[0215] The increased growth rate may be specific to one or more parts of a plant (including seeds), or may be throughout substantially the whole plant. Plants having an increased growth rate may have a shorter life cycle. The life cycle of a plant may be taken to mean the time needed to grow from a mature seed up to the stage where the plant has produced mature seeds, similar to the starting material. This life cycle may be influenced by factors such as speed of germination, early vigour, growth rate, greenness index, flowering time and speed of seed maturation. The increase in growth rate may take place at one or more stages in the life cycle of a plant or during substantially the whole plant life cycle. Increased growth rate during the early stages in the life cycle of a plant may reflect enhanced vigour. The increase in growth rate may alter the harvest cycle of a plant allowing plants to be sown later and/or harvested sooner than would otherwise be possible (a similar effect may be obtained with earlier flowering time). If the growth rate is sufficiently increased, it may allow for the further sowing of seeds of the same plant species (for example sowing and harvesting of rice plants followed by sowing and harvesting of further rice plants all within one conventional growing period). Similarly, if the growth rate is sufficiently increased, it may allow for the further sowing of seeds of different plants species (for example the sowing and harvesting of corn plants followed by, for example, the sowing and optional harvesting of soybean, potato or any other suitable plant). Harvesting additional times from the same rootstock in the case of some crop plants may also be possible. Altering the harvest cycle of a plant may lead to an increase in annual biomass production per square meter (due to an increase in the number of times (say in a year) that any particular plant may be grown and harvested). An increase in growth rate may also allow for the cultivation of transgenic plants in a wider geographical area than their wild-type counterparts, since the territorial limitations for growing a crop are often determined by adverse environmental conditions either at the time of planting (early season) or at the time of harvesting (late season). Such adverse conditions may be avoided if the harvest cycle is shortened. The growth rate may be determined by deriving various parameters from growth curves, such parameters may be: T-Mid (the time taken for plants to reach 50% of their maximal size) and T-90 (time taken for plants to reach 90% of their maximal size), amongst others.

### Stress Resistance

[0216] An increase in yield and/or growth rate occurs whether the plant is under non-stress conditions or whether the plant is exposed to various stresses compared to control plants. Plants typically respond to exposure to stress by growing more slowly. In conditions of severe stress, the plant may even stop growing altogether. Mild stress on the other hand is defined herein as being any stress to which a plant is exposed which does not result in the plant ceasing to grow altogether without the capacity to resume growth. Mild stress in the sense of the invention leads to a reduction in the growth of the stressed plants of less than 40%, 35%, 30% or 25%, more preferably less than 20% or 15% in comparison to the control plant under non-stress conditions. Due to advances in agricultural practices (irrigation, fertilization, pesticide treatments) severe stresses are not often encountered in cultivated crop plants. As a consequence, the compromised growth induced by mild stress is often an undesirable feature for agriculture. Abiotic stresses may be due to drought or excess water, anaerobic stress, salt stress, chemical toxicity, oxidative stress and hot, cold or freezing temperatures.

[0217] “Biotic stresses” are typically those stresses caused by pathogens, such as bacteria, viruses, fungi, nematodes and insects.

[0218] The “abiotic stress” may be an osmotic stress caused by a water stress, e.g. due to drought, salt stress, or freezing stress. Abiotic stress may also be an oxidative stress or a cold stress. “Freezing stress” is intended to refer to stress due to freezing temperatures, i.e. temperatures at which available water molecules freeze and turn into ice. “Cold stress”, also called “chilling stress”, is intended to refer to cold temperatures, e.g. temperatures below 10°, or preferably below 5° C., but at which water molecules do not freeze. As reported in Wang et al. (Planta (2003) 218: 1-14), abiotic stress leads to a series of morphological, physiological, biochemical and molecular changes that adversely affect plant growth and productivity. Drought, salinity, extreme temperatures and oxidative stress are known to be interconnected and may induce growth and cellular damage through similar mechanisms. Rabbani et al. (Plant Physiol (2003) 133: 1755-1767) describes a particularly high degree of “cross talk” between drought stress and high-salinity stress. For example, drought and/or salinisation are manifested primarily as osmotic stress, resulting in the disruption of homeostasis and ion distribution in the cell. Oxidative stress, which frequently accompanies high or low temperature, salinity or drought stress, may cause denaturing of functional and structural proteins. As a consequence, these diverse environmental stresses often activate similar cell signalling pathways and cellular responses, such as the production of stress proteins, up-regulation of anti-oxidants, accumulation of compatible solutes and growth arrest. The term “non-stress” conditions as used herein are those environmental conditions that allow optimal growth of plants. Persons skilled in the art are aware of normal soil conditions and climatic conditions for a given location. Plants with optimal growth conditions, (grown under non-stress conditions) typically yield in increasing order of preference at least 97%, 95%, 92%, 90%, 87%, 85%, 83%, 80%, 77% or 75% of the average production of such plant in a given environment. Average production may be calculated on harvest and/or season basis. Persons skilled in the art are aware of average yield productions of a crop.

[0219] In particular, the methods of the present invention may be performed under non-stress conditions. In an example, the methods of the present invention may be performed under non-stress conditions such as mild drought to give plants having increased yield relative to control plants.

[0220] In another embodiment, the methods of the present invention may be performed under stress conditions.

[0221] In an example, the methods of the present invention may be performed under stress conditions such as drought to give plants having increased yield relative to control plants.

[0222] In another example, the methods of the present invention may be performed under stress conditions such as nutrient deficiency to give plants having increased yield relative to control plants.

[0223] Nutrient deficiency may result from a lack of nutrients such as nitrogen, phosphates and other phosphorous-containing compounds, potassium, calcium, magnesium, manganese, iron and boron, amongst others.

[0224] In yet another example, the methods of the present invention may be performed under stress conditions such as salt stress to give plants having increased yield relative to control plants. The term salt stress is not restricted to common salt (NaCl), but may be any one or more of: NaCl, KCl, LiCl, MgCl₂, CaCl₂, amongst others.

[0225] In yet another example, the methods of the present invention may be performed under stress conditions such as cold stress or freezing stress to give plants having increased yield relative to control plants.

### Increase/Improve/Enhance

[0226] The terms “increase”, “improve” or “enhance” are interchangeable and shall mean in the sense of the application at least a 3%, 4%, 5%, 6%, 7%, 8%, 9% or 10%, preferably at least 15% or 20%, more preferably 25%, 30%, 35% or 40% more yield and/or growth in comparison to control plants as defined herein.

### Seed Yield

[0227] Increased seed yield may manifest itself as one or more of the following:
[0228] (a) an increase in seed biomass (total seed weight) which may be on an individual seed basis and/or per plant and/or per square meter;
[0229] (b) increased number of flowers per plant;
[0230] (c) increased number of seeds;
[0231] (d) increased seed filling rate (which is expressed as the ratio between the number of filled florets divided by the total number of florets);
[0232] (e) increased harvest index, which is expressed as a ratio of the yield of harvestable parts, such as seeds, divided by the biomass of aboveground plant parts; and
[0233] (f) increased thousand kernel weight (TKW), which is extrapolated from the number of seeds counted and their total weight. An increased TKW may result from an increased seed size and/or seed weight, and may also result from an increase in embryo and/or endosperm size.

[0234] The terms “filled florets” and “filled seeds” may be considered synonyms.

[0235] An increase in seed yield may also be manifested as an increase in seed size and/or seed volume. Furthermore, an increase in seed yield may also manifest itself as an increase in seed area and/or seed length and/or seed width and/or seed perimeter.

### Greenness Index

[0236] The “greenness index” as used herein is calculated from digital images of plants. For each pixel belonging to the plant object on the image, the ratio of the green value versus the red value (in the RGB model for encoding color) is calculated. The greenness index is expressed as the percentage of pixels for which the green-to-red ratio exceeds a given threshold. Under normal growth conditions, under salt stress growth conditions, and under reduced nutrient availability growth conditions, the greenness index of plants is measured in the last imaging before flowering. In contrast, under drought stress growth conditions, the greenness index of plants is measured in the first imaging after drought.

### Biomass

[0237] The term “biomass” as used herein is intended to refer to the total weight of a plant. Within the definition of biomass, a distinction may be made between the biomass of one or more parts of a plant, which may include any one or more of the following:
[0238] aboveground parts such as but not limited to shoot biomass, seed biomass, leaf biomass, etc.;
[0239] aboveground harvestable parts such as but not limited to shoot biomass, seed biomass, leaf biomass, etc.;
[0240] parts below ground, such as but not limited to root biomass, tubers, bulbs, etc.;
[0241] harvestable parts below ground, such as but not limited to root biomass, tubers, bulbs, etc.;
[0242] harvestable parts partially below ground such as but not limited to beets and other hypocotyl areas of a plant, rhizomes, stolons or creeping rootstalks;
[0243] vegetative biomass such as root biomass, shoot biomass, etc.;
[0244] reproductive organs; and
[0245] propagules such as seed.

### Marker Assisted Breeding

[0246] Such breeding programmes sometimes require introduction of allelic variation by mutagenic treatment of the plants, using for example EMS mutagenesis; alternatively, the programme may start with a collection of allelic variants of so called “natural” origin caused unintentionally. Identification of allelic variants then takes place, for example, by PCR. This is followed by a step for selection of superior allelic variants of the sequence in question and which give increased yield. Selection is typically carried out by monitoring growth performance of plants containing different allelic variants of the sequence in question. Growth performance may be monitored in a greenhouse or in the field. Further optional steps include crossing plants in which the superior allelic variant was identified with another plant. This could be used, for example, to make a combination of interesting phenotypic features.

### Use as Probes in (Gene Mapping)

[0247] Use of nucleic acids encoding the protein of interest for genetically and physically mapping the genes requires only a nucleic acid sequence of at least 15 nucleotides in length. These nucleic acids may be used as restriction fragment length polymorphism (RFLP) markers. Southern blots (Sambrook J, Fritsch E F and Maniatis T (1989) Molecular Cloning, A Laboratory Manual) of restriction-digested plant genomic DNA may be probed with the nucleic acids encoding the protein of interest. The resulting banding patterns may then be subjected to genetic analyses using computer programs such as MapMaker (Lander et al. (1987) Genomics 1: 174-181) in order to construct a genetic map. In addition, the nucleic acids may be used to probe Southern blots containing restriction endonuclease-treated genomic DNAs of a set of individuals representing parent and progeny of a defined genetic cross. Segregation of the DNA polymorphisms is noted and used to calculate the position of the nucleic acid encoding the protein of interest in the genetic map previously obtained using this population (Botstein et al. (1980) Am. J. Hum. Genet. 32:314-331).

[0248] The production and use of plant gene-derived probes for use in genetic mapping is described in Bernatzky and Tanksley (1986) Plant Mol. Biol. Reporter 4: 37-41. Numerous publications describe genetic mapping of specific cDNA clones using the methodology outlined above or variations thereof. For example, F2 intercross populations, backcross populations, randomly mated populations, near isogenic lines, and other sets of individuals may be used for mapping. Such methodologies are well known to those skilled in the art.

[0249] The nucleic acid probes may also be used for physical mapping (i.e., placement of sequences on physical maps; see Hoheisel et al. In: Non-mammalian Genomic Analysis: A Practical Guide, Academic press 1996, pp. 319-346, and references cited therein).

[0250] In another embodiment, the nucleic acid probes may be used in direct fluorescence in situ hybridisation (FISH) mapping (Trask (1991) Trends Genet. 7:149-154). Although current methods of FISH mapping favour use of large clones (several kb to several hundred kb; see Laan et al. (1995) Genome Res. 5:13-20), improvements in sensitivity may allow performance of FISH mapping using shorter probes.

[0251] A variety of nucleic acid amplification-based methods for genetic and physical mapping may be carried out using the nucleic acids. Examples include allele-specific amplification (Kazazian (1989) J. Lab. Clin. Med 11:95-96), polymorphism of PCR-amplified fragments (CAPS; Sheffield et al. (1993) Genomics 16:325-332), allele-specific ligation (Landegren et al. (1988) Science 241:1077-1080), nucleotide extension reactions (Sokolov (1990) Nucleic Acid Res. 18:3671), Radiation Hybrid Mapping (Walter et al. (1997) Nat. Genet. 7:22-28) and Happy Mapping (Dear and Cook (1989) Nucleic Acid Res. 17:6795-6807). For these methods, the sequence of a nucleic acid is used to design and produce primer pairs for use in the amplification reaction or in primer extension reactions. The design of such primers is well known to those skilled in the art. In methods employing PCR-based genetic mapping, it may be necessary to identify DNA sequence differences between the parents of the mapping cross in the region corresponding to the instant nucleic acid sequence. This, however, is generally not necessary for mapping methods.

### Plant

[0252] The term “plant” as used herein encompasses whole plants, ancestors and progeny of the plants and plant parts, including seeds, shoots, stems, leaves, roots (including tubers), flowers, and tissues and organs, wherein each of the aforementioned comprise the gene/nucleic acid of interest. The term “plant” also encompasses plant cells, suspension cultures, callus tissue, embryos, meristematic regions, gametophytes, sporophytes, pollen and microspores, again wherein each of the aforementioned comprises the gene/nucleic acid of interest.

[0253] Plants that are particularly useful in the methods of the invention include all plants which belong to the superfamily Viridiplantae, in particular monocotyledonous and dicotyledonous plants including fodder or forage legumes, ornamental plants, food crops, trees or shrubs selected from the list comprising Acer spp., Actinidia spp., Abelmoschus spp., Agave sisalana, Agropyron spp., Agrostis stolonifera, Allium spp., Amaranthus spp., Ammophila arenaria, Ananas comosus, Annona spp., Apium graveolens, Arachis spp, Artocarpus spp., Asparagus officinalis, Avena spp. (e.g. Avena sativa, Avena fatua, Avena byzantina, Avena fatua var. sativa, Avena hybrida), Averrhoa carambola, Bambusa sp., Benincasa hispida, Bertholletia excelsea, Beta vulgaris, Brassica spp. (e.g. Brassica napus, Brassica rapa ssp. [canola, oilseed rape, turnip rape]), Cadaba farinosa, Camellia sinensis, Canna indica, Cannabis sativa, Capsicum spp., Carex elata, Carica papaya, Carissa macrocarpa, Carya spp., Carthamus tinctorius, Castanea spp., Ceiba pentandra, Cichorium endivia, Cinnamomum spp., Citrullus lanatus, Citrus spp., Cocos spp., Coffea spp., Colocasia esculenta, Cola spp., Corchorus sp., Coriandrum sativum, Corylus spp., Crataegus spp., Crocus sativus, Cucurbita spp., Cucumis spp., Cynara spp., Daucus carota, Desmodium spp., Dimocarpus longan, Dioscorea spp., Diospyros spp., Echinochloa spp., Elaeis(e.g. Elaeis guineensis, Elaeis oleifera), Eleusine coracana, Eragrostis tef, Erianthus sp., Eriobotrya japonica, Eucalyptus sp., Eugenia uniflora, Fagopyrum spp., Fagus spp., Festuca arundinacea, Ficus carica, Fortunella spp., Fragaria spp., Ginkgo biloba, Glycine spp. (e.g. Glycine max, Soja hispida or Soja max), Gossypium hirsutum, Helianthus spp. (e.g. Helianthus annuus), Hemerocallis fulva, Hibiscus spp., Hordeum spp. (e.g. Hordeum vulgare), Ipomoea batatas, Juglans spp., Lactuca sativa, Lathyrus spp., Lens culinaris, Linum usitatissimum, Litchi chinensis, Lotus spp., Luffa acutangula, Lupinus spp., Luzula sylvatica, Lycopersicon spp. (e.g. Lycopersicon esculentum, Lycopersicon lycopersicum, Lycopersicon pyriforme), Macrotyloma spp., Malus spp., Malpighia emarginata, Mammea americana, Mangifera indica, Manihot spp., Manilkara zapota, Medicago sativa, Melilotus spp., Mentha spp., Miscanthus sinensis, Momordica spp., Morus nigra, Musa spp., Nicotiana spp., Olea spp., Opuntia spp., Ornithopus spp., Oryza spp. (e.g. Oryza sativa, Oryza latifolia), Panicum miliaceum, Panicum virgatum, Passiflora edulis, Pastinaca sativa, Pennisetum sp., Persea spp., Petroselinum crispum, Phalaris arundinacea, Phaseolus spp., Phleum pratense, Phoenix spp., Phragmites australis, Physalis spp., Pinus spp., Pistacia vera, Pisum spp., Poa spp., Populus spp., Prosopis spp., Prunus spp., Psidium spp., Punica granatum, Pyrus communis, Quercus spp., Raphanus sativus, Rheum rhabarbarum, Ribes spp., Ricinus communis, Rubus spp., Saccharum spp., Salix sp., Sambucus spp., Secale cereale, Sesamum spp., Sinapis sp., Solanum spp. (e.g. Solanum tuberosum, Solanum integrifolium or Solanum lycopersicum), Sorghum bicolor, Spinacia spp., Syzygium spp., Tagetes spp., Tamarindus indica, Theobroma cacao, Trifolium spp., Tripsacum dactyloides, Triticosecale rimpaui, Triticum spp. (e.g. Triticum aestivum, Triticum durum, Triticum turgidum, Triticum hybernum, Triticum macha, Triticum sativum, Triticum monococcum or Triticum vulgare), Tropaeolum minus, Tropaeolum majus, Vaccinium spp., Vicia spp., Vigna spp., Viola odorata, Vitis spp., Zea mays, Zizania palustris, Ziziphus spp., amongst others.

### Control Plant(s)

[0254] The choice of suitable control plants is a routine part of an experimental setup and may include corresponding wild type plants or corresponding plants without the gene of interest. The control plant is typically of the same plant species or even of the same variety as the plant to be assessed. The control plant may also be a nullizygote of the plant to be assessed. Nullizygotes (or null control plants) are individuals missing the transgene by segregation. Further, control plants are grown under equal growing conditions to the growing conditions of the plants of the invention, i.e. in the vicinity of, and simultaneously with, the plants of the invention. A “control plant” as used herein refers not only to whole plants, but also to plant parts, including seeds and seed parts.

### EXAMPLES

[0255] The present invention will now be described with reference to the following examples, which are by way of illustration only. The following examples are not intended to limit the scope of the invention. Unless otherwise indicated, the present invention employs conventional techniques and methods of plant biology, molecular biology, bioinformatics and plant breedings.

[0256] DNA manipulation: unless otherwise stated, recombinant DNA techniques are performed according to standard protocols described in (Sambrook (2001) Molecular Cloning: a laboratory manual, 3rd Edition Cold Spring Harbor Laboratory Press, CSH, New York) or in Volumes 1 and 2 of Ausubel et al. (1994), Current Protocols in Molecular Biology, Current Protocols. Standard materials and methods for plant molecular work are described in Plant Molecular Biology Labfax (1993) by R. D. D. Croy, published by BIOS Scientific Publications Ltd (UK) and Blackwell Scientific Publications (UK).

### Example 1

### GRP Sequences and Homologues Thereof

[0257] Table A provides a list of nucleic acid sequences and protein sequences used for generating transgenic plants described in Example 7.

| | | | Nucleic acid | Protein |
|---|---|---|---|---|
| Plant Source | ZM array number | Description | SEQ ID NO: | SEQ ID NO: |
| Oryza sativa | ZM4s07788 | Orysa_auxin-repressed protein | 1 | 2 |
| Oryza sativa | ZM1s68450033 | Orysa_CBS domain containing | 3 | 4 |
| | | membrane protein | | |
| Oryza sativa | ZM1s60334585 | Orysa_dehydration-induced | 5 | 6 |
| | | protein ERD15 | | |
| Oryza sativa | ZM1s57410125 | Orysa_LOC_Os01g06640 | 7 | 8 |
| Oryza sativa | ZM1s58705134 | Orysa_LOC_Os01g63690 | 9 | 10 |
| Oryza sativa | ZM1s60103573 | Orysa_LOC_Os01g68650 | 11 | 12 |
| Oryza sativa | ZM1s57443595 | Orysa_LOC_Os01g70860.1 | 13 | 14 |
| Oryza sativa | ZM1s60213342 | Orysa_LOC_Os02g04120 | 15 | 16 |
| Oryza sativa | ZM4s05301 | Orysa_LOC_Os02g04230 | 17 | 18 |
| Oryza sativa | ZM1s60940818 | Orysa_LOC_Os02g06720 for | 19 | 20 |
| | | downregulation | | |
| Oryza sativa | ZM1s60940818 | Orysa_LOC_Os02g06725 | 21 | 22 |
| Oryza sativa | ZM1s61299604 | Orysa_LOC_Os02g07240 | 23 | 24 |
| Oryza sativa | ZM4s31512 | Orysa_LOC_Os02g15800 | 25 | 26 |
| Oryza sativa | ZM1s65223113 | Orysa_LOC_Os02g36490 | 27 | 28 |
| Oryza sativa | ZM1s62030237 | Orysa_LOC_Os02g45170 | 29 | 30 |
| Oryza sativa | ZM1s57223022 | Orysa_LOC_Os02g48990 | 31 | 32 |
| Oryza sativa | ZM1s60187950 | Orysa_LOC_Os02g52560 | 33 | 34 |
| Oryza sativa | ZM1s62114467 | Orysa_LOC_Os02g58730 | 35 | 36 |
| Oryza sativa | ZM1s62145107 | Orysa_LOC_Os03g09220 | 37 | 38 |
| Oryza sativa | ZM1s59517939 | Orysa_LOC_Os03g10210 | 39 | 40 |
| Oryza sativa | ZM1s59034758 | Orysa_LOC_Os03g11770 | 41 | 42 |
| Oryza sativa | ZM1s62059350 | Orysa_LOC_Os03g17790 | 43 | 44 |
| Oryza sativa | ZM1s62187860 | Orysa_LOC_Os03g17800 | 45 | 46 |
| Oryza sativa | ZM4s07964 | Orysa_LOC_Os03g46490 | 47 | 48 |
| Oryza sativa | ZM1s62219636 | Orysa_LOC_Os03g55670 | 49 | 50 |
| Oryza sativa | ZM1s66928877.1 | Orysa_LOC_Os03g64219 | 51 | 52 |
| Oryza sativa | ZM4s14939 | Orysa_LOC_Os04g35790 | 53 | 54 |
| Oryza sativa | ZM4s22201 | Orysa_LOC_Os05g07070 | 55 | 56 |
| Oryza sativa | ZM1s62216784 | Orysa_LOC_Os05g40770 | 57 | 58 |
| Oryza sativa | ZM1a61978583 | Orysa_LOC_Os05g50510 | 59 | 60 |
| Oryza sativa | ZM1s62075387 | Orysa_LOC_Os06g01440 | 61 | 62 |
| Oryza sativa | ZM4s29073 | Orysa_LOC_Os06g05120 | 63 | 64 |
| Oryza sativa | ZM1s57336820 | Orysa_LOC_Os06g06250.2 | 65 | 66 |
| Oryza sativa | ZM1s68504043 | Orysa_LOC_Os06g11840.1 | 67 | 68 |
| Oryza sativa | ZM3s01411 | Orysa_LOC_Os07g35004 | 69 | 70 |
| Oryza sativa | ZM1s67010779 | Orysa_LOC_Os08g01390 for | 71 | 72 |
| | | downregulation | | |
| Oryza sativa | ZM1s57853588 | Orysa_LOC_Os08g01760 | 73 | 74 |
| Oryza sativa | ZM1s67094909 | Orysa_LOC_Os08g26870 | 75 | 76 |
| Oryza sativa | ZM1s60496018 | Orysa_LOC_Os08g31250 | 77 | 78 |
| Oryza sativa | ZM1s57505415 | Orysa_LOC_Os08g37070 | 79 | 80 |
| Oryza sativa | ZM4s14446 | Orysa_LOC_Os08g40030 | 81 | 82 |
| Oryza sativa | ZM4s23596 | Orysa_LOC_Os08g42400 | 83 | 84 |
| Oryza sativa | ZM1s58474578 | Orysa_LOC_Os08g44270 | 85 | 86 |
| Oryza sativa | ZM3s01404 | Orysa_LOC_Os09g11440 | 87 | 88 |
| Oryza sativa | ZM1s58561763 | Orysa_LOC_Os09g20284 | 89 | 90 |
| Oryza sativa | ZM1s62127538 | Orysa_LOC_Os10g39130 | 91 | 92 |
| Oryza sativa | ZM1a61994414 | Orysa_LOC_Os10g40710 | 93 | 94 |
| Oryza sativa | ZM1s57236502 | Orysa_LOC_Os11g27400 | 95 | 96 |
| Oryza sativa | ZM4s20980 | Orysa_LOC_Os12g32970 | 97 | 98 |
| Oryza sativa | ZM4s14399 | Orysa_LOC_Os12g32992 | 99 | 100 |
| Oryza sativa | ZM4s27634 | Orysa_Os04g42470 | 101 | 102 |
| Oryza sativa | ZM1a62119712 | Orysa_Os04g54300 | 103 | 104 |
| Oryza sativa | ZM1s62025034 | Orysa_putative serine/threonine | 105 | 106 |
| | | protein kinase | | |
| Oryza sativa | ZM1s62132790 | Orysa_WRKY7 for downregulation | 107 | 108 |
| Zea mays | ZM1s59458241 | Zeama_AC214266.3_FGT002 | 109 | 110 |
| Zea mays | ZM1s62033152 | Zeama_AC214350.3_FGT007 | 111 | 112 |
| Zea mays | ZM1s62096975 | Zeama_ATACP5; protein serine/ | 113 | 114 |
| | | threonine phosphatase | | |
| Zea mays | ZM1s60481108 | Zeama_calmodulin binding | 115 | 116 |
| Zea mays | ZM4s37206 | Zeama_GRMZM2G000645 | 117 | 118 |
| Zea mays | ZM1s57508357 | Zeama_GRMZM2G000825 | 119 | 120 |
| Zea mays | ZM4s16403 | Zeama_GRMZM2G001221 | 121 | 122 |
| Zea mays | ZM4s22803 | Zeama_GRMZM2G004459 | 123 | 124 |
| Zea mays | ZM1s57740507 | Zeama_GRMZM2G005040_T01 | 125 | 126 |
| Zea mays | ZM4s13892 | Zeama_GRMZM2G005260 | 127 | 128 |
| Zea mays | ZM1s65250927 | Zeama_GRMZM2G005435 | 129 | 130 |
| Zea mays | ZM4S19342 | Zeama_GRMZM2G007466 | 131 | 132 |
| Zea mays | ZM1S62132058 | Zeama_GRMZM2G007729 | 133 | 134 |
| Zea mays | ZM1s57554822 | Zeama_GRMZM2G007899 | 135 | 136 |
| Zea mays | ZM1s57259830 | Zeama_GRMZM2G008657 | 137 | 138 |
| Zea mays | ZM1S61984928 | Zeama_GRMZM2G009412 | 139 | 140 |
| Zea mays | ZM4s11447 | Zeama_GRMZM2G009837_T01 | 141 | 142 |
| Zea mays | ZM1s65113928 | Zeama_GRMZM2G010356_T01 | 143 | 144 |
| Zea mays | ZM1S62273254 | Zeama_GRMZM2G011110 | 145 | 146 |
| Zea mays | ZM1s57807604 | Zeama_GRMZM2G011357_T01 | 147 | 148 |
| Zea mays | ZM1s62063823 | Zeama_GRMZM2G012224_T01 | 149 | 150 |
| Zea mays | ZM1S58972630 | Zeama_GRMZM2G013627 | 151 | 152 |
| Zea mays | ZM4S02093 | Zeama_GRMZM2G013657 | 153 | 154 |
| Zea mays | ZM1s58375824 | Zeama_GRMZM2G014750 | 155 | 156 |
| Zea mays | ZM1S57638002 | Zeama_GRMZM2G015433 | 157 | 158 |
| Zea mays | ZM1S60466311 | Zeama_GRMZM2G018689 | 159 | 160 |
| Zea mays | ZM1s57738137 | Zeama_GRMZM2G018771 | 161 | 162 |
| Zea mays | ZM1s57429621 | Zeama_GRMZM2G020150 | 163 | 164 |
| Zea mays | ZM4s41243 | Zeama_GRMZM2G020281_T03 | 165 | 166 |
| Zea mays | ZM1s61998920 | Zeama_GRMZM2G021270 | 167 | 168 |
| Zea mays | ZM1s62262119 | Zeama_GRMZM2G023242 | 169 | 170 |
| Zea mays | ZM1S57850754 | Zeama_GRMZM2G025812 | 171 | 172 |
| Zea mays | ZM1s57263625 | Zeama_GRMZM2G027052 | 173 | 174 |
| Zea mays | ZM4s45997 | Zeama_GRMZM2G028218 | 175 | 176 |
| Zea mays | ZM1s60841542 | Zeama_GRMZM2G029692 | 177 | 178 |
| Zea mays | ZM1s62202989 | Zeama_GRMZM2G030284 | 179 | 180 |
| Zea mays | ZM1s59258289 | Zeama_GRMZM2G031724 | 181 | 182 |
| Zea mays | ZM1s55817549 | Zeama_GRMZM2G031983_T01 | 183 | 184 |
| Zea mays | ZM1s58561763 | Zeama_GRMZM2G034152_T01 | 185 | 186 |
| Zea mays | ZM3s21693 | Zeama_GRMZM2G034157 | 187 | 188 |
| Zea mays | ZM1s68299591 | Zeama_GRMZM2G036120 | 189 | 190 |
| Zea mays | ZM4S19630 | Zeama_GRMZM2G036134 | 191 | 192 |
| Zea mays | ZM1s60105986 | Zeama_GRMZM2G036351 | 193 | 194 |
| Zea mays | ZM1s57431009 | Zeama_GRMZM2G037001_T01 | 195 | 196 |
| Zea mays | ZM4s19587 | Zeama_GRMZM2G038066 | 197 | 198 |
| Zea mays | ZM1s61992039 | Zeama_GRMZM2G040517_T01 | 199 | 200 |
| Zea mays | ZM1s60429690 | Zeama_GRMZM2G041774 | 201 | 202 |
| Zea mays | ZM1s60312671 | Zeama_GRMZM2G042895 | 203 | 204 |
| Zea mays | ZM1S68765176 | Zeama_GRMZM2G043147 | 205 | 206 |
| Zea mays | ZM4s39700 | Zeama_GRMZM2G043275_T01 | 207 | 208 |
| Zea mays | ZM4s13777 | Zeama_GRMZM2G044027_T01 | 209 | 210 |
| Zea mays | ZM1s58678671 | Zeama_GRMZM2G044576_T01 | 211 | 212 |
| Zea mays | ZM1s62146990 | Zeama_GRMZM2G044851_T01 | 213 | 214 |
| Zea mays | ZM1a68352777 | Zeama_GRMZM2G047684 | 215 | 216 |
| Zea mays | ZM1S55843902 | Zeama_GRMZM2G049091 | 217 | 218 |
| Zea mays | ZM4s45895 | Zeama_GRMZM2G049398_T01 | 219 | 220 |
| Zea mays | ZM4s46105 | Zeama_GRMZM2G052078 | 221 | 222 |
| Zea mays | ZM1s58862414 | Zeama_GRMZM2G052509 | 223 | 224 |
| Zea mays | ZM1s62012391 | Zeama_GRMZM2G053766 | 225 | 226 |
| Zea mays | ZM4s14974 | Zeama_GRMZM2G055458 | 227 | 228 |
| Zea mays | ZM1S60958648 | Zeama_GRMZM2G055585 | 229 | 230 |
| Zea mays | ZM1s67282786 | Zeama_GRMZM2G056038 | 231 | 232 |
| Zea mays | ZM1s58335548 | Zeama_GRMZM2G056407_T01 | 233 | 234 |
| Zea mays | ZM3S00100 | Zeama_GRMZM2G056600 | 235 | 236 |
| Zea mays | ZM4s03858 | Zeama_GRMZM2G057283_T01 | 237 | 238 |
| Zea mays | ZM1s62139486 | Zeama_GRMZM2G057789 | 239 | 240 |
| Zea mays | ZM1s58751265 | Zeama_GRMZM2G058690_T02 | 241 | 242 |
| Zea mays | ZM4s42869 | Zeama_GRMZM2G059580 | 243 | 244 |
| Zea mays | ZM1S58075442 | Zeama_GRMZM2G059799 | 245 | 246 |
| Zea mays | ZM1s62207107 | Zeama_GRMZM2G060163 | 247 | 248 |
| Zea mays | ZM1s59183793 | Zeama_GRMZM2G061745 | 249 | 250 |
| Zea mays | ZM1s62167066 | Zeama_GRMZM2G061996_T01 | 251 | 252 |
| Zea mays | ZM1s57461756 | Zeama_GRMZM2G062160 | 253 | 254 |
| Zea mays | ZM4s10805 | Zeama_GRMZM2G062531 | 255 | 256 |
| Zea mays | ZM1s59012895 | Zeama_GRMZM2G064096_T01 | 257 | 258 |
| Zea mays | ZM4s15692 | Zeama_GRMZM2G064960 | 259 | 260 |
| Zea mays | ZM4a18634 | Zeama_GRMZM2G066528 | 261 | 262 |
| Zea mays | ZM4s03279 | Zeama_GRMZM2G073755 | 263 | 264 |
| Zea mays | ZM4s17107 | Zeama_GRMZM2G075942 | 265 | 266 |
| Zea mays | ZM1s62055151 | Zeama_GRMZM2G077206 | 267 | 268 |
| Zea mays | ZM4s24055 | Zeama_GRMZM2G077458 | 269 | 270 |
| Zea mays | ZM4s13911 | Zeama_GRMZM2G078198 | 271 | 272 |
| Zea mays | ZM1s57963623 | Zeama_GRMZM2G079805 | 273 | 274 |
| Zea mays | ZM1s60747775 | Zeama_GRMZM2G080295_T01 | 275 | 276 |
| Zea mays | ZM1s62026868 | Zeama_GRMZM2G082032 | 277 | 278 |
| Zea mays | ZM1s62161812 | Zeama_GRMZM2G082853 | 279 | 280 |
| Zea mays | ZM1s65109710 | Zeama_GRMZM2G083068 | 281 | 282 |
| Zea mays | ZM4s33018 | Zeama_GRMZM2G083935 | 283 | 284 |
| Zea mays | ZM1S58460807 | Zeama_GRMZM2G084264 | 285 | 286 |
| Zea mays | ZM1S60657408 | Zeama_GRMZM2G084587 | 287 | 288 |
| Zea mays | ZM1s62162828 | Zeama_GRMZM2G087103 | 289 | 290 |
| Zea mays | ZM1S57495842 | Zeama_GRMZM2G087323 | 291 | 292 |
| Zea mays | ZM1s58524553 | Zeama_GRMZM2G088162 | 293 | 294 |
| Zea mays | ZM1S57862466 | Zeama_GRMZM2G089259 | 295 | 296 |
| Zea mays | ZM1s66890980.1 | Zeama_GRMZM2G090487_T01 | 297 | 298 |
| Zea mays | ZM1s59343090 | Zeama_GRMZM2G090595_T04 | 299 | 300 |
| Zea mays | ZM1S59395629 | Zeama_GRMZM2G091228 | 301 | 302 |
| Zea mays | ZM4s22079 | Zeama_GRMZM2G091540 | 303 | 304 |
| Zea mays | ZM1s57288195 | Zeama_GRMZM2G092137 | 305 | 306 |
| Zea mays | ZM1s55864617 | Zeama_GRMZM2G093217 | 307 | 308 |
| Zea mays | ZM4s17135 | Zeama_GRMZM2G093900 | 309 | 310 |
| Zea mays | ZM1S57836157 | Zeama_GRMZM2G095392 | 311 | 312 |
| Zea mays | ZM1s58775973 | Zeama_GRMZM2G098046 | 313 | 314 |
| Zea mays | ZM1s68295211 | Zeama_GRMZM2G100120 | 315 | 316 |
| Zea mays | ZM1s61258515 | Zeama_GRMZM2G100260_T01 | 317 | 318 |
| Zea mays | ZM3s00430 | Zeama_GRMZM2G100467_T01 | 319 | 320 |
| Zea mays | ZM4s18637 | Zeama_GRMZM2G101062 | 321 | 322 |
| Zea mays | ZM1s62058690 | Zeama_GRMZM2G101125 | 323 | 324 |
| Zea mays | ZM1s62258567 | Zeama_GRMZM2G101390 | 325 | 326 |
| Zea mays | ZM1S65226266 | Zeama_GRMZM2G101545 | 327 | 328 |
| Zea mays | ZM1s61974300 | Zeama_GRMZM2G102347 | 329 | 330 |
| Zea mays | ZM3S29285 | Zeama_GRMZM2G102356 | 331 | 332 |
| Zea mays | ZM4s05881 | Zeama_GRMZM2G102786_T01 | 333 | 334 |
| Zea mays | ZM4s37616 | Zeama_GRMZM2G104610_T01 | 335 | 336 |
| Zea mays | ZM1A57699438 | Zeama_GRMZM2G105331 | 337 | 338 |
| Zea mays | ZM4s21938 | Zeama_GRMZM2G105348 | 339 | 340 |
| Zea mays | ZM1s58374993 | Zeama_GRMZM2G107737_T01 | 341 | 342 |
| Zea mays | ZM3s01330 | Zeama_GRMZM2G107771_T01 | 343 | 344 |
| Zea mays | ZM1S62039207 | Zeama_GRMZM2G107839 | 345 | 346 |
| Zea mays | ZM4S17089 | Zeama_GRMZM2G108115 | 347 | 348 |
| Zea mays | ZM4s14568 | Zeama_GRMZM2G108716 | 349 | 350 |
| Zea mays | ZM4s26880 | Zeama_GRMZM2G109130 | 351 | 352 |
| Zea mays | ZM1S67201464 | Zeama_GRMZM2G110289 | 353 | 354 |
| Zea mays | ZM4s18047 | Zeama_GRMZM2G111451_T01 | 355 | 356 |
| Zea mays | ZM4a14205 | Zeama_GRMZM2G112210 | 357 | 358 |
| Zea mays | ZM1S58101138 | Zeama_GRMZM2G112903 | 359 | 360 |
| Zea mays | ZM1s59421232 | Zeama_GRMZM2G114048 | 361 | 362 |
| Zea mays | ZM1s57921389 | Zeama_GRMZM2G114552 | 363 | 364 |
| Zea mays | ZM1s62190425 | Zeama_GRMZM2G114873 | 365 | 366 |
| Zea mays | ZM1s57679770 | Zeama_GRMZM2G115975 | 367 | 368 |
| Zea mays | ZM1s62204322 | Zeama_GRMZM2G116526 | 369 | 370 |
| Zea mays | ZM1s57370356 | Zeama_GRMZM2G116632_T01 | 371 | 372 |
| Zea mays | ZM1S65126433 | Zeama_GRMZM2G117989 | 373 | 374 |
| Zea mays | ZM4S19741 | Zeama_GRMZM2G119906 | 375 | 376 |
| Zea mays | ZM1s62126803 | Zeama_GRMZM2G121074 | 377 | 378 |
| Zea mays | ZM4s11447 | Zeama_GRMZM2G122228_T01 | 379 | 380 |
| Zea mays | ZM1s61995217 | Zeama_GRMZM2G123212 | 381 | 382 |
| Zea mays | ZM1s60485681 | Zeama_GRMZM2G124863 | 383 | 384 |
| Zea mays | ZM4s22440 | Zeama_GRMZM2G125923 | 385 | 386 |
| Zea mays | ZM4S45457 | Zeama_GRMZM2G126397 | 387 | 388 |
| Zea mays | ZM1S65239103 | Zeama_GRMZM2G126566 | 389 | 390 |
| Zea mays | ZM1s65368508 | Zeama_GRMZM2G127609 | 391 | 392 |
| Zea mays | ZM4s27549 | Zeama_GRMZM2G127695 | 393 | 394 |
| Zea mays | ZM1s68704853 | Zeama_GRMZM2G127850_T01 | 395 | 396 |
| Zea mays | ZM4s06440 | Zeama_GRMZM2G127893 | 397 | 398 |
| Zea mays | ZM1s60510343 | Zeama_GRMZM2G132854 | 399 | 400 |
| Zea mays | ZM1s57861573 | Zeama_GRMZM2G137596_T01 | 401 | 402 |
| Zea mays | ZM1S57327061 | Zeama_GRMZM2G138131 | 403 | 404 |
| Zea mays | ZM1s65129831 | Zeama_GRMZM2G139082_T01 | 405 | 406 |
| Zea mays | ZM1s58505914 | Zeama_GRMZM2G142735 | 407 | 408 |
| Zea mays | ZM4s07707 | Zeama_GRMZM2G143253_T01 | 409 | 410 |
| Zea mays | ZM1s59390494 | Zeama_GRMZM2G147623 | 411 | 412 |
| Zea mays | ZM1s62038184 | Zeama_GRMZM2G152354 | 413 | 414 |
| Zea mays | ZM4s04639 | Zeama_GRMZM2G152561_T02 | 415 | 416 |
| Zea mays | ZM4s17046 | Zeama_GRMZM2G152908 | 417 | 418 |
| Zea mays | ZM4s29494 | Zeama_GRMZM2G154648 | 419 | 420 |
| Zea mays | ZM1s57348884 | Zeama_GRMZM2G156110_T01 | 421 | 422 |
| Zea mays | ZM4s10874 | Zeama_GRMZM2G158232 | 423 | 424 |
| Zea mays | ZM1s57457322 | Zeama_GRMZM2G158313_T01 | 425 | 426 |
| Zea mays | ZM1s62093950 | Zeama_GRMZM2G159034 | 427 | 428 |
| Zea mays | ZM4s19175 | Zeama_GRMZM2G161295 | 429 | 430 |
| Zea mays | ZM1s57320274 | Zeama_GRMZM2G163406 | 431 | 432 |
| Zea mays | ZM1s62027902 | Zeama_GRMZM2G163409 | 433 | 434 |
| Zea mays | ZM1S58592636 | Zeama_GRMZM2G163641 | 435 | 436 |
| Zea mays | ZM4S06145 | Zeama_GRMZM2G164781 | 437 | 438 |
| Zea mays | ZM1s57368153 | Zeama_GRMZM2G164868 | 439 | 440 |
| Zea mays | ZM4s11036 | Zeama_GRMZM2G165461 | 441 | 442 |
| Zea mays | ZM1s62097506 | Zeama_GRMZM2G166946 | 443 | 444 |
| Zea mays | ZM1s57441890 | Zeama_GRMZM2G168365 | 445 | 446 |
| Zea mays | ZM1s58699795 | Zeama_GRMZM2G168603_T01 | 447 | 448 |
| Zea mays | ZM1s61048230 | Zeama_GRMZM2G170400 | 449 | 450 |
| Zea mays | ZM4s16359 | Zeama_GRMZM2G172657 | 451 | 452 |
| Zea mays | ZM1a62154780 | Zeama_GRMZM2G174558 | 453 | 454 |
| Zea mays | ZM1s62106945 | Zeama_GRMZM2G174975 | 455 | 456 |
| Zea mays | ZM1s57848822 | Zeama_GRMZM2G175280_T02 | 457 | 458 |
| Zea mays | ZM1s57305612 | Zeama_GRMZM2G176217 | 459 | 460 |
| Zea mays | ZM1S68614544 | Zeama_GRMZM2G177867 | 461 | 462 |
| Zea mays | ZM1s67253381 | Zeama_GRMZM2G178815_T01 | 463 | 464 |
| Zea mays | ZM4s30153 | Zeama_GRMZM2G179679 | 465 | 466 |
| Zea mays | ZM1S62018816 | Zeama_GRMZM2G180172 | 467 | 468 |
| Zea mays | ZM1s66894694 | Zeama_GRMZM2G302245_T01 | 469 | 470 |
| Zea mays | ZM1a61141890 | Zeama_GRMZM2G304362 | 471 | 472 |
| Zea mays | ZM4s06217 | Zeama_GRMZM2G307119_T01 | 473 | 474 |
| Zea mays | ZM1s62016000 | Zeama_GRMZM2G310368 | 475 | 476 |
| Zea mays | ZM1s60135266 | Zeama_GRMZM2G312510 | 477 | 478 |
| Zea mays | ZM1S60857688.1 | Zeama_GRMZM2G320920 | 479 | 480 |
| Zea mays | ZM1s58409566 | Zeama_GRMZM2G321023 | 481 | 482 |
| Zea mays | ZM1s62083330 | Zeama_GRMZM2G327032 | 483 | 484 |
| Zea mays | ZM1s61980732 | Zeama_GRMZM2G334181_T01 | 485 | 486 |
| Zea mays | ZM1s62099803 | Zeama_GRMZM2G340130 | 487 | 488 |
| Zea mays | ZM1s68469961 | Zeama_GRMZM2G341404 | 489 | 490 |
| Zea mays | ZM1A57511883 | Zeama_GRMZM2G345840 | 491 | 492 |
| Zea mays | ZM1s62064657 | Zeama_GRMZM2G347043 | 493 | 494 |
| Zea mays | ZM1s57766027 | Zeama_GRMZM2G347808 | 495 | 496 |
| Zea mays | ZM1s57319204 | Zeama_GRMZM2G355752 | 497 | 498 |
| Zea mays | ZM4s16535 | Zeama_GRMZM2G359952 | 499 | 500 |
| Zea mays | ZM1s57952044 | Zeama_GRMZM2G368698_T02 | 501 | 502 |
| Zea mays | ZM4S03593 | Zeama_GRMZM2G394410 | 503 | 504 |
| Zea mays | ZM1S57374543.1 | Zeama_GRMZM2G401521 | 505 | 506 |
| Zea mays | ZM1s61979139 | Zeama_GRMZM2G402417 | 507 | 508 |
| Zea mays | ZM1s62009031 | Zeama_GRMZM2G407223 | 509 | 510 |
| Zea mays | ZM1S62216882 | Zeama_GRMZM2G408598 | 511 | 512 |
| Zea mays | ZM1a62058338 | Zeama_GRMZM2G411032 | 513 | 514 |
| Zea mays | ZM1A57765201 | Zeama_GRMZM2G412601 | 515 | 516 |
| Zea mays | ZM1s60200790 | Zeama_GRMZM2G413337 | 517 | 518 |
| Zea mays | ZM1S66879359 | Zeama_GRMZM2G416388 | 519 | 520 |
| Zea mays | ZM1S58357601 | Zeama_GRMZM2G421212 | 521 | 522 |
| Zea mays | ZM1s67275443 | Zeama_GRMZM2G422240 | 523 | 524 |
| Zea mays | ZM1S57790868 | Zeama_GRMZM2G438195 | 525 | 526 |
| Zea mays | ZM1s62144084 | Zeama_GRMZM2G445634 | 527 | 528 |
| Zea mays | ZM1s62046845 | Zeama_GRMZM2G447984 | 529 | 530 |
| Zea mays | ZM1s55843675 | Zeama_GRMZM2G450153 | 531 | 532 |
| Zea mays | ZM1s62083561 | Zeama_GRMZM2G451254 | 533 | 534 |
| Zea mays | ZM4s06441 | Zeama_GRMZM2G458164 | 535 | 536 |
| Zea mays | ZM1s58973247 | Zeama_GRMZM2G468756_T01 | 537 | 538 |
| Zea mays | ZM1s62187177 | Zeama_GRMZM2G476069 | 539 | 540 |
| Zea mays | ZM1s57375517 | Zeama_GRMZM2G477503 | 541 | 542 |
| Zea mays | ZM4s03412 | Zeama_GRMZM2G479260 | 543 | 544 |
| Zea mays | ZM4s11878 | Zeama_GRMZM2G481888_T01 | 545 | 546 |
| Zea mays | ZM4s26962 | Zeama_GRMZM2G701362 | 547 | 548 |
| Zea mays | ZM1s60573546 | zeama_heat shock 70 protein | 549 | 550 |
| Zea mays | ZM3s00628 | Zeama_Methyl transferase like | 551 | 552 |
| Zea mays | ZM1s61220142 | Zeama_nucleic acid binding/ | 553 | 554 |
| | | zinc ion binding | | |
| Zea mays | ZM4s15474 | Zeama_Pleitropic Drug Resistance | 555 | 556 |
| | | 12 like | | |
| Zea mays | ZM1s65094362 | Zeama_putative nuclear RNA | 557 | 558 |
| | | binding protein | | |
| Zea mays | ZM4a37469 | Zeama_putative zinc-finger protein | 559 | 560 |
| Zea mays | ZM4s40513 | Zeama_SYTE like | 561 | 562 |
| Zea mays | ZM1a58376939 | Zeama_transferase protein like | 563 | 564 |
| Zea mays | ZM1s61987040 | Zeama_unknown protein a | 565 | 566 |
| Zea mays | ZM1s62016945 | Zeama_unknown protein b | 567 | 568 |
| Zea mays | ZM1s62111342 | Zeama_unknown protein c | 569 | 570 |
| Zea mays | ZM1s61053034 | Zeama_Unknown protein d | 571 | 572 |
| Zea mays | ZM1s58196890 | Zeama_Unknown protein e | 573 | 574 |
| Zea mays | ZM1s57483885 | Zeama_unknown protein f | 575 | 576 |
| Zea mays | ZM4s16739 | Zeama_unknown protein g | 577 | 578 |
| Zea mays | ZM1a58376939 | Zeama_unknown protein h | 579 | 580 |
| Zea mays | ZM1s55866371 | Zeama_ZM1s55866371 | 581 | 582 |
| Zea mays | ZM1s55873260 | Zeama_ZM1s55873260 | 583 | 584 |
| Zea mays | ZM1s58530935 | Zeama_ZM1s58530935 | 585 | 586 |
| Zea mays | ZM1s59031313 | Zeama_ZM1s59031313 | 587 | 588 |
| Zea mays | ZM1s61996727 | Zeama_ZM1s61996727 | 589 | 590 |
| Zea mays | ZM1s65116286 | Zeama_ZM1s65116286 | 591 | 592 |
| Zea mays | ZM1s62111307 | Zm AAA-type ATPase family | 593 | 594 |
| | | protein-like | | |
| Zea mays | ZM1s57394235 | Zm ATP-binding protein | 595 | 596 |
| Zea mays | ZM1s58425424 | Zm AUXIN RESPONSE | 597 | 598 |
| | | FACTOR 16 | | |
| Zea mays | ZM1s62214832 | Zm Cyclin A2; 4-like | 599 | 600 |
| Zea mays | ZM1s68382282 | Zm embryo-abundant protein-related | 601 | 602 |
| Zea mays | ZM1s57390634 | Zm histidine kinase 1 | 603 | 604 |
| Zea mays | ZM4s13278 | Zm indole-3-acetic acid amido | 605 | 606 |
| | | synthetase-like 1 | | |
| Zea mays | ZM1s61040508 | Zm indole-3-acetic acid amido | 607 | 608 |
| | | synthetase-like 2 | | |
| Zea mays | ZM1s62107983 | Zm indoleacetic acid-induced | 609 | 610 |
| | | protein 13-like 1 | | |
| Zea mays | ZM1s59209789 | Zm indoleacetic acid-induced | 611 | 612 |
| | | protein 13-like 2 | | |
| Zea mays | ZM1s58194594 | Zm indoleacetic acid-induced | 613 | 614 |
| | | protein 18 | | |
| Zea mays | ZM1s57509684 | Zm indoleacetic acid-induced | 615 | 616 |
| | | protein 20-like | | |
| Zea mays | ZM3s01845 | Zm MYB78 like | 617 | 618 |
| Zea mays | ZM1s62004697 | Zm PHYTOCHROME- | 619 | 620 |
| | | ASSOCIATED PROTEIN 1-like | | |
| Zea mays | ZM4s18277 | Zm Polygalacturonase inhibiting | 621 | 622 |
| | | protein 1-like | | |
| Zea mays | ZM1s57260204 | Zm Proliferating Cellular Nuclear | 623 | 624 |
| | | Antigen 1 | | |
| Zea mays | ZM1s60983186 | Zm protein kinase-related | 625 | 626 |
| Zea mays | ZM1s60157931 | Zm U-box domain-containing protein | 627 | 628 |
| Zea mays | ZM4s09532 | Zm unknown protein 1 | 629 | 630 |
| Zea mays | ZM1s62122111 | Zm unknown protein 2 | 631 | 632 |
| Zea mays | ZM1s62075438 | Zm unknown protein 3 | 633 | 634 |
| Zea mays | ZM1s57691797 | Zm unknown protein 4 | 635 | 636 |
| Zea mays | ZM1s62132790 | Zm WRKY (WRKY DNA-binding | 637 | 638 |
| | | protein 23-like) | | |
| Zea mays | ZM1s60455877 | Zm WRKY 40-like | 639 | 640 |

[0258] Sequences (full length cDNA, ESTs or genomic) related to those listed in Table A above can be identified amongst those maintained in the Entrez Nucleotides database at the National Center for Biotechnology Information (NCBI) using database sequence search tools, such as the Basic Local Alignment Tool (BLAST) (Altschul et al. (1990) J. Mol. Biol. 215:403-410; and Altschul et al. (1997) Nucleic Acids Res. 25:3389-3402). The program is used to find regions of local similarity between sequences by comparing nucleic acid or polypeptide sequences to sequence databases and by calculating the statistical significance of matches. For example, polypeptides encoded by the nucleic acids listed in Table A can be used with the TBLASTN algorithm, with default settings and the filter to ignore low complexity sequences set off. The output of the analysis can be viewed by pairwise comparison, and ranked according to the probability score (E-value), where the score reflect the probability that a particular alignment occurs by chance (the lower the E-value, the more significant the hit). In addition to E-values, comparisons may also be scored by percentage identity. Percentage identity refers to the number of identical nucleotides (or amino acids) between the two compared nucleic acid (or polypeptide) sequences over a particular length. In some instances, the default parameters may be adjusted to modify the stringency of the search. For example the E-value may be increased to show less stringent matches. This way, short nearly exact matches may be identified.

[0259] Sequences have been tentatively assembled and publicly disclosed by research institutions, such as The Institute for Genomic Research (TIGR; beginning with TA). For instance, the Eukaryotic Gene Orthologs (EGO) database may be used to identify such related sequences, either by keyword search or by using the BLAST algorithm with the nucleic acid sequence or polypeptide sequence of interest. Special nucleic acid sequence databases have been created for particular organisms, e.g. for certain prokaryotic organisms, such as by the Joint Genome Institute. Furthermore, access to proprietary databases, has allowed the identification of novel nucleic acid and polypeptide sequences.

### Example 2

### Alignment of GRP Polypeptide Sequences

[0260] Alignment of the polypeptide sequences representing a GRP protein of Table A and its homologues may be performed using the ClustalW 2.0 algorithm of progressive alignment (Thompson et al. (1997) Nucleic Acids Res 25:4876-4882; Chenna et al. (2003). Nucleic Acids Res 31:3497-3500) with standard setting (slow alignment, similarity matrix: Gonnet, gap opening penalty 10, gap extension penalty: 0.2). Minor manual editing may be done to further optimise the alignment. Generation of multiple alignments is well known in the art.

[0261] A phylogenetic tree of a GRP polypeptide of Table A and its homologues may be constructed by aligning GRP sequences using, for example, MAFFT (Katoh and Toh (2008)—Briefings in Bioinformatics 9:286-298) with default settings. A neighbour-joining tree is then calculated using, for example, Quick-Tree (Howe et al. (2002), Bioinformatics 18(11): 1546-7), with 100 bootstrap repetitions. The dendrogram is drawn using, for example, Dendroscope (Huson et al. (2007), BMC Bioinformatics 8(1):460). Confidence levels for 100 bootstrap repetitions are usually indicated for major branchings.

### Example 3

### Calculation of Global Percentage Identity Between Polypeptide Sequences

[0262] Global percentages of similarity and identity between full length polypeptide sequences useful in performing the methods of the invention are determined using MatGAT (Matrix Global Alignment Tool) software (BMC Bioinformatics. 2003 4:29. MatGAT: an application that generates similarity/identity matrices using protein or DNA sequences. Campanella J J, Bitincka L, Smalley J; software hosted by Ledion Bitincka). MatGAT generates similarity/identity matrices for DNA or protein sequences without needing pre-alignment of the data. The program performs a series of pair-wise alignments using the Myers and Miller global alignment algorithm, calculates similarity and identity, and then places the results in a distance matrix. Sequence similarity is shown in the bottom half of the dividing line and sequence identity is shown in the top half of the diagonal dividing line. Parameters used in the protein analysis are typically: Scoring matrix: Blosum62, First Gap: 12, Extending Gap: 2.

[0263] Like for full length sequences, a MATGAT table based on subsequences of a specific domain, may be generated. Based on a multiple alignment of GRP polypeptides, a skilled person may select conserved sequences and submit as input for a MaTGAT analysis. This approach is useful where overall sequence conservation among GRP proteins is rather low.

### Example 4

### Identification of Domains Comprised in Polypeptide Sequences Useful in Performing the Methods of the Invention

[0264] The Integrated Resource of Protein Families, Domains and Sites (InterPro) database is an integrated interface for the commonly used signature databases for text- and sequence-based searches. The InterPro database combines these databases, which use different methodologies and varying degrees of biological information about well-characterized proteins to derive protein signatures. Collaborating databases include SWISS-PROT, PROSITE, TrEMBL, PRINTS, ProDom and Pfam, Smart and TIGRFAMs. Pfam is a large collection of multiple sequence alignments and hidden Markov models covering many common protein domains and families. Pfam is hosted at the Sanger Institute server in the United Kingdom. Interpro is hosted at the European Bioinformatics Institute in the United Kingdom.

[0265] Results of the InterPro scan (InterPro database, release 34.0) of a selection of GRP polypeptide sequence from Table A are listed hereunder.

Sequence “ZM1S55817549” crc64 checksum: 1DB9E7773AC36AAF length: 361 aa.

| | | |
|---|---|---|
| InterPro | IPR000679 | Zinc finger, GATA-type |

Molecular Function: transcription factor activity (GO:0003700), Cellular Component: nucleus (GO:0005634),
Biological Process: regulation of transcription, DNA-dependent (GO:0006355), Molecular Function: zinc ion
binding (GO:0008270), Molecular Function: sequence-specific DNA binding (GO:0043565)

| method | AccNumber | shortName | location |
|---|---|---|---|
| HMMPfam | PF00320 | GATA | T[191-226] 1.1e−18 |
| HMMSmart | SM00401 | no description | T[185-237] 3.3e−19 |
| ProfileScan | PS50114 | GATA_ZN_FINGER_2 | T[189-221] 12.466 |
| ScanRegExp | PS00344 | GATA_ZN_FINGER_1 | ?[191-216] NA |
| InterPro | IPR013088 | Zinc finger, NHR/GATA-type | |

Molecular Function: transcription factor activity (GO:0003700), Biological Process: regulation of
transcription, DNA-dependent (GO:0006355), Molecular Function: zinc ion binding (GO:0008270)

| method | AccNumber | shortName | location |
|---|---|---|---|
| Gene3D | G3DSA:3.30.50.10 | no description | T[185-229] 2.4e−05 |
| InterPro | NULL | NULL | |
| method | AccNumber | shortName | location |
| HMMPanther | PTHR10071 | TRANSCRIPTION FACTOR GATA | T[11-18] 1.7e−05 T[188-221] 1.7e−5 |
| | | (GATA BINDING FACTOR) | |
| Seg | seg | seg | ?[134-139] NA ?[219-236] NA ?[287-302] |
| | | | NA ?[322-334] NA |
| superfamily | SSF57716 | Glucocorticoid receptor-like | T[80-246] 3.7e−14 |
| | | (DNA-binding domain) | |

Sequence “ZM1S60958648” crc64 checksum: 10C1558B1D15EA57 length: 426 aa.

| | | |
|---|---|---|
| InterPro | IPR013781 | Glycoside hydrolase, subgroup, catalytic core |

Molecular Function: catalytic activity (GO:0003824), Biological Process: carbohydrate metabolic process
(GO:0005975), Molecular Function: cation binding (G0:0043169)

| method | AccNumber | shortName | location |
|---|---|---|---|
| Gene3D | G3DSA:3.20.20.80 | no description | T[28-410] 2.9e−132 |
| InterPro | IPR017853 | Glycoside hydrolase, catalytic core | |
| method | AccNumber | shortName | location |
| superfamily | SSF51445 | (Trans)glycosidases | T[28-400] 7.5e−89 |
| InterPro | NULL | NULL | |
| method | AccNumber | shortName | location |
| Seg | seg | seg | ?[2-14] NA ?[70-83] NA ?[91-96] NA |
| | | | ?[409-425] NA |
| SignalPHMM | signalp | signal-peptide | ?[1-22] NA |

Sequence “ZM1S60983186” crc64 checksum: E8BAF56AF1838CBC length: 491 aa.

| | | |
|---|---|---|
| InterPro | IPR000719 | Protein kinase, core |

Molecular Function: protein kinase activity (GO:0004672), Molecular Function: ATP binding (GO:0005524),
Biological Process: protein amino acid phosphorylation (GO:0006468)

| method | AccNumber | shortName | location |
|---|---|---|---|
| BlastProDom | PD000001 | Q94GE0_ORYSA Q94GE0; | T[69-313] 3e−134 |
| ProfileScan | PS50011 | PROTEIN_KINASE_DOM | T[55-322] 20.160 |
| InterPro | IPR001245 | Tyrosine protein kinase | |

Molecular Function: protein-tyrosine kinase activity (GO:0004713), Molecular Function: ATP binding
(GO:0005524), Biological Process: protein amino acid phosphorylation (GO:0006468)

| method | AccNumber | shortName | location |
|---|---|---|---|
| HMMPfam | PF07714 | Pkinase_Tyr | T[68-134] 2.1e−06 |
| HMMSmart | SM00219 | no description | T[55-307] 2.1e−08 |
| InterPro | IPR002290 | Serine/threonine protein kinase | |

Molecular Function: protein serine/threonine kinase activity (GO:0004674), Molecular Function: ATP binding
(GO:0005524), Biological Process: protein amino acid phosphorylation (GO:0006468)

| method | AccNumber | shortName | location |
|---|---|---|---|
| HMMSmart | SM00220 | no description | T[55-316] 7.4e−08 |
| InterPro | IPR011009 | Protein kinase-like | |
| method | AccNumber | shortName | location |
| superfamily | SSF56112 | Protein kinase-like (PK-like) | T[37-327] 2.2e−43 |
| InterPro | IPR011990 | Tetratricopeptide-like helical | |

Molecular Function: binding (GO:0005488)

| method | AccNumber | shortName | location |
|---|---|---|---|
| Gene3D | G3DSA:1.25.40.10 | no description | T[378-481] 1.5e−09 |
| InterPro | NULL | NULL | |
| method | AccNumber | shortName | location |
| Gene3D | G3DSA:1.10.510.10 | no description | T[131-335] 7.2e−23 |
| Gene3D | G3DSA:3.30.200.20 | no description | T[33-131] 4.8e−11 |
| HMMPanther | PTHR23258 | SERINE-THREONINE PROTEIN KINASE, PLANT-TYPE | T[29-484] 4.6e−262 |
| HMMPanther | PTHR23258:SF457 | PROTEIN KINASE-LIKE PROTEIN | T[29-484] 4.6e−262 |
| superfamily | SSF48452 | TPR-like | T[82-480] 9.5e−10 |

Sequence “ZM1S62018816” crc64 checksum: DCA5D5DC3B026BD4 length: 426 aa.

| InterPro | NULL | NULL | |
|---|---|---|---|
| method | AccNumber | shortName | location |
| Seg | seg | seg | ?[112-137] NA ?[248-263] NA |
| TMHMM | tmhmm | transmembrane_regions | ?[315-337] NA |

Sequence “ZM1S62063823” crc64 checksum: 329D087C5DB89A45 length: 390 aa.

| InterPro | IPR006946 | Protein of unknown function DUF642 | |
|---|---|---|---|
| method | AccNumber | shortName | location |
| HMMPfam | PF04862 | DUF642 | T[64-389] 2.4e−193 |
| InterPro | IPR008979 | Galactose-binding like | |
| method | AccNumber | shortName | location |
| superfamily | SSF49785 | Galactose-binding domain-like | T[51-209] 4.2e−07 T[219-388] 0.0019 |
| InterPro | NULL | NULL | |
| method | AccNumber | shortName | location |
| Seg | seg | seg | ?[8-42] NA |
| SignalPHMM | signalp | signal-peptide | ?[1-25] NA |

Sequence “ZM4S45895” crc64 checksum: 9F0BD4B998057088 length: 119 aa.

| | | |
|---|---|---|
| InterPro | IPR007741 | Mitochondrial ribosome |

| method | AccNumber | shortName | location |
|---|---|---|---|
| HMMPfam | PF05047 | L51_S25_CI-B8 | T[18-91] 3.2e−24 |
| InterPro | NULL | NULL | |
| method | AccNumber | shortName | location |
| HMMPanther | PTHR21396 | 39S RIBOSOMAL PROTEIN L43 | T[4-114] 1.2e−48 |
| HMMPanther | PTHR21396:SF2 | 60S RIBOSOMAL PROTEIN L51 | T[4-114] 1.2e−48 |

Sequence “ZM1S68704853” crc64 checksum: C1B601532AE00FF3 length: 305 aa.

| InterPro | IPR001680 | WD40 repeat | |
|---|---|---|---|
| method | AccNumber | shortName | location |
| BlastProDom | PD000018 | Q8W403_ORYSA_Q8W403; | T[50-84] 4e−13 T[209-244] 4e−05 |
| FPrintScan | PR00320 | GPROTEINBRPT | T[72-86] 8.9e−06 T[182-196] 8.9e−06 |
| | | | T[232-246] 8.9e−06 |
| HMMPfam | PF00400 | WD40 | T[1-39] 0.0003 T[45-85] 2.3e−10 T[93-133] |
| | | | 1.3e−07 T[140-195] 4.3e−09 T[203-245] 1.5e−08 |
| HMMSmart | SM00320 | no description | T[2-39] 0.41 T[44-85] 2.2e−08 T[92-133] 2.7e−05 |
| | | | T[139-195] 0.033 T[202-245] 0.0003 T[254-290] 0.55 |
| ProfileScan | PS50082 | WD_REPEATS_2 | T[7-37] 8.537 T[51-85] 10.408 T[182-204] 8.704 |
| | | | T[209-244] 10.943 |
| ProfileScan | PS50294 | WD_REPEATS_REGION | T[7-299] 27.948 |
| InterPro | IPR011046 | WD40 repeat-like | |
| method | AccNumber | shortName | location |
| superfamily | SSF50978 | WD40 repeat-like | T[1-290] 1.9e−50 |
| InterPro | IPR015943 | WD40/YVTN repeat-like | |
| method | AccNumber | shortName | location |
| Gene3D | G3DSA:2.130.10.10 | no description | T[8-294] 7.3e−61 |
| InterPro | NULL | NULL | |
| method | AccNumber | shortName | location |
| HMMPanther | PTHR11024 | PROTEIN TRANSPORT PROTEIN SEC13-RELATED | T[7-305] 1.7e−175 |
| HMMPanther | PTHR11024:SF2 | PROTEIN TRANSPORT PROTEIN SEC13 | T[7-305] 1.7e−175 |

Sequence “ZM4S07964” crc64 checksum: 5F668E8D83CF5645 length: 82 aa.

| | | |
|---|---|---|
| InterPro | IPR001931 | Ribosomal protein S21e |

Molecular Function: structural constituent of ribosome (GO:0003735), Cellular Component: intracellular
(GO:0005622), Cellular Component: ribosome (GO:0005840), Biological Process: translation (GO:0006412)

| method | AccNumber | shortName | location |
|---|---|---|---|
| BlastProDom | PD006584 | RS21_ORYSA_P35687; | T[26-74] 8e−23 |
| HMMPIR | PIRSF002148 | Ribosomal protein S21e | T[1-82] 1e−50 |
| HMMPanther | PTHR10442 | 40S RIBOSOMAL PROTEIN S21E | T[2-82] 4.9e−47 |
| HMMPfam | PF01249 | Ribosomal_S21e | T[1-81] 8.5e−60 |
| ScanRegExp | PS00996 | RIBOSOMAL_S21E | T[11-19] 8e−5 |

Sequence “ZM1S65239103” crc64 checksum: D9F7188DB3E52343 length: 300 aa.

| | | |
|---|---|---|
| InterPro | IPR001005 | SANT, DNA-binding |

Molecular Function: DNA binding (GO:0003677)

| method | AccNumber | shortName | location |
|---|---|---|---|
| HMMSmart | SM00717 | no description | T[13-63] 7.2e-12 T[66-114] 5.6e−15 |
| ProfileScan | PS50090 | MYB_3 | T[9-61] 15.442 T[62-112] 15.512 |
| ScanRegExp | PS00037 | MYB_1 | ?[17-25] NA |
| ScanRegExp | PS00334 | MYB_2 | T[89-112] 8e−5 |
| InterPro | IPR009057 | Homeodomain-like | |
| method | AccNumber | shortName | location |
| superfamily | SSF46689 | Homeodomain-like | T[14-84] 9.3e−19 T[86-146] 1e−13 |
| InterPro | IPR012287 | Homeodomain-related | |

Molecular Function: DNA binding (GO:0003677), Biological Process: regulation of transcription (GO:0045449)

| method | AccNumber | shortName | location |
|---|---|---|---|
| Gene3D | G3DSA:1.10.10.60 | no description | T[12-64] 2.2e−13 T[68-116] 1e−16 |
| InterPro | IPR014778 | Myb, DNA-binding | |
| method | AccNumber | shortName | location |
| HMMPfam | PF00249 | Myb_DNA-binding | T[14-61] 4.7e−10 T[67-112] 5.2e−10 |
| InterPro | IPR015495 | Myb transcription factor | |
| method | AccNumber | shortName | location |
| HMMPanther | PTHR10641 | MYB-RELATED | T[3-142] 2.5e−97 |
| InterPro | NULL | NULL | |
| method | AccNumber | shortName | location |
| HMMPanther | PTHR10641:SF30 | R2R3-MYB TRANSCRIPTION FACTOR | T[3-142] 2.5e−97 |
| Seg | seg | seg | ?[131-143] NA ?[191-236] NA |

Sequence “ZM1S59258289” crc64 checksum: E21693C982A6C0C9 length: 338 aa.

| InterPro | IPR005123 | 2OG-Fe(II) oxygenase | |
|---|---|---|---|
| method | AccNumber | shortName | location |
| HMMPfam | PF03171 | 2OG-FeII_Oxy | T[177-287] 1.5e−33 |
| InterPro | NULL | NULL | |
| method | AccNumber | shortName | location |
| Gene3D | G3DSA:2.60.120.330 | no description | T[29-335] 6.2e−76 |
| HMMPanther | PTHR10209 | IRON/ASCORBATE-DEPENDENT | T[39-326] 6.3e−133 |
| | | OXIDOREDUCTASE FAMILY MEMBER | |
| HMMPanther | PTHR10209:SF8 | GIBBERELLIN 2-BETA-DIOXYGENASE 2 | T[39-326] 6.3e−133 |
| Seg | seg | seg | ?[113-125] NA ?[142-152] NA |
| superfamily | SSF51197 | Clavaminate synthase-like | T[29-329] 1.4e−78 |

Sequence ″ZM1A68352777″ crc64 checksum: 0ED63F3B6A2E49FA length: 563 aa.

| | | |
|---|---|---|
| InterPro | IPR001128 | Cytochrome P450 |

Molecular Function: monooxygenase activity (GO: 0004497), Molecular Function: iron ion binding (GO: 0005506),
Biological Process: electron transport (GO: 0006118), Molecular Function: heme binding (GO: 0020037)

| | | | |
|---|---|---|---|
| method | AccNumber | shortName | location |
| FPrintScan | PR00385 | P450 | T[354-371] 6.5e−14 T[407-418] 6.5e−14 |

T[484-493] 6.5e−14 T[493-504] 6.5e−14

| | | | |
|---|---|---|---|
| Gene3D | G3DSA: 1.10.630.10 | no description | T[94-548] 1.6e−104 |
| HMMPanther | PTHR19383 | CYTOCHROME P450 | T[27-73] 5.4e−185 T[94-514] 5.4e−185 |
| HMMPfam | PF00067 | p450 | T[86-542] 1.4e−59 |
| ScanRegExp | PS00086 | CYTOCHROME_P450 | ?[486-495] NA |
| superfamily | SSF48264 | Cytochrome P450 | T[57-544] 2.7e−109 |
| InterPro | IPR002401 | Cytochrome P450, E−class, group I | |

Molecular Function: monooxygenase activity (GO: 0004497), Molecular Function: iron ion binding (GO: 0005506),
Biological Process: electron transport (GO: 0006118), Molecular Function: heme binding (GO: 0020037)

| | | | |
|---|---|---|---|
| method | AccNumber | shortName | location |
| FPrintScan | PR00463 | EP450I | T[104-123] 2.3e−24 T[128-149] 2.3e−24 |

T[343-360] 2.3e−24 T[363-389] 2.3e−24 T[483-493] 2.3e−24 T[493-516] 2.3e−24

| | | | |
|---|---|---|---|
| InterPro | NULL | NULL | |
| method | AccNumber | shortName | location |
| HMMPanther | PTHR19383: SF174 | CYTOCHROME P450, SUBFAMILY 72 | T[27-73] 5.4e−185 T[94-514] 5.4e−185 |
| Seg | seg | seg | ?[18-30] NA ?[327-335] NA |
| SignalPHMM | signalp | signal-peptide | ?[1-35] NA |
| TMHMM | tmhmm | transmembrane_regions | ?[13-35] NA |

Sequence ″ZM4S13278″ crc64 checksum: 8FA559338699CF78
length: 610 aa.

| | | | |
|---|---|---|---|
| InterPro | IPR004993 | GH3 auxin-responsive promoter | |
| method | AccNumber | shortName | location |
| HMMPfam | PF03321 | GH3 | T[35-584] 0 |
| InterPro | NULL | NULL | |
| method | AccNumber | shortName | location |
| Seg | seg | seg | ?[13-29] NA |

Sequence ″ZM1S61040508″ crc64 checksum: 131843319F9E7FD8 length: 614 aa.

| | | | |
|---|---|---|---|
| InterPro | IPR004993 | GH3 auxin-responsive promoter | |
| method | AccNumber | shortName | location |
| HMMPfam | PF03321 | GH3 | T[33-588] 0 |
| InterPro | NULL | NULL | |
| method | AccNumber | shortName | location |
| Seg | seg | seg | ?[72-83] NA ?[386-396] NA |

Sequence ″ZM1S62064657″ crc64 checksum: 0B1A10A3C6485A7F length: 312 aa.

| | | |
|---|---|---|
| InterPro | IPR003441 | No apical meristem (NAM) protein |

Molecular Function: DNA binding (G0: 0003677), Biological Process: regulation of transcription (G0: 0045449)

| | | | |
|---|---|---|---|
| method | AccNumber | shortName | location |
| HMMPfam | PF02365 | NAM | T[17-143] 5.6e−86 |
| ProfileScan | PS51005 | NAC | T[17-169] 60.395 |
| superfamily | SSF101941 | NAC domain | T[1-170] 1.3e−68 |
| InterPro | NULL | NULL | |
| method | AccNumber | shortName | location |
| Seg | seg | seg | ?[141-158] NA ?[198-211] NA |

Sequence ″ZM4S14568″ crc64 checksum: B6E028AA73574C57 length: 368 aa.

| | | |
|---|---|---|
| InterPro | IPR001222 | Zinc finger, TFIIS-type |

Molecular Function: nucleic acid binding (GO: 0003676), Molecular Function: zinc ion binding (GO: 0008270),
Molecular Function: transcription regulator activity (GO: 0030528), Biological Process: regulation of
transcription (GO: 0045449)

| | | | |
|---|---|---|---|
| method | AccNumber | shortName | location |
| HMMPfam | PF01096 | TFIIS_C | T[328-366] 7.6e−23 |
| HMMSmart | SM00440 | no description | T[328-367] 3.5e−22 |
| ProfileScan | PS51133 | ZF_TFIIS_2 | T[326-366] 14.437 |
| ScanRegExp | PS00466 | ZF_TFIIS_1 | T[330-365] 8e−5 |

| | | |
|---|---|---|
| InterPro | IPR003617 | Transcription elongation factor, TFIIS/CRSP70, N-terminal, sub-type |

Cellular Component: nucleus (GO: 0005634), Biological Process: transcription (GO: 0006350)

| | | | |
|---|---|---|---|
| method | AccNumber | shortName | location |
| HMMSmart | SM00509 | no description | T[8-85] 2.3e−12 |

| | | |
|---|---|---|
| InterPro | IPR003618 | Transcription elongation factor S-II, central region |

Biological Process: transcription (GO: 0006350)

| | | | |
|---|---|---|---|
| method | AccNumber | shortName | location |
| HMMPfam | PF07500 | TFIIS_M | T[189-317] 2.1e−48 |
| HMMSmart | SM00510 | no description | T[191-306] 3.2e−23 |
| superfamily | SSF46942 | Elongation factor TFIIS domain 2 | T[172-299] 4.5e−24 |
| InterPro | IPR006289 | Transciption elongation factor, TFIIS | |

Molecular Function: nucleic acid binding (GO: 0003676), Molecular Function: RNA polymerase II transcription
factor activity (GO: 0003702), Molecular Function: translation elongation factor activity (GO: 0003746),
Molecular Function: protein binding (GO: 0005515), Cellular Component: nucleus (GO: 0005634), Biological
Process: RNA elongation (GO: 0006354), Biological Process: regulation of transcription, DNA-dependent
(GO: 0006355)

| | | | |
|---|---|---|---|
| method | AccNumber | shortName | location |
| HMMTigr | TIGR01385 | TFSII: transcription elongation factor S-II | T[11-368] 4.4e−101 |

| | | |
|---|---|---|
| InterPro | IPR010990 | Transcription elongation factor, TFIIS/elongin A/CRSP70, N-terminal |

Molecular Function: DNA binding (GO: 0003677), Molecular Function: protein binding (GO: 0005515), Cellular
Component: nucleus (GO: 0005634), Biological Process: transcription (GO: 0006350), Molecular Function:
transcription regulator activity (GO: 0030528)

| | | | |
|---|---|---|---|
| method | AccNumber | shortName | location |
| HMMPfam | PF08711 | TFIIS | T[1-93] 5.55e−06 |

| | | |
|---|---|---|
| superfamily | SSF47676 | Conserved domain common to transcription factors TFIIS, elong A, CRSP70T [9-84] |

2.5e−10

| | | |
|---|---|---|
| InterPro | IPR014765 | Transcription elongation factor, TFIIS/CRSP70, N-terminal |

Molecular Function: DNA binding (GO: 0003677), Molecular Function: protein binding (GO: 0005515), Cellular
Component: nucleus (GO: 0005634), Biological Process: transcription (GO: 0006350), Molecular Function:
transcription regulator activity (GO: 0030528)

| | | | |
|---|---|---|---|
| method | AccNumber | shortName | location |
| Gene3D | G3DSA: 1.25.40.260 | no description | T[24-100] 3e−07 |

| | | |
|---|---|---|
| InterPro | IPR016492 | Transcription elongation factor, IIS |

Molecular Function: transcription elongation regulator activity (GO: 0003711), Biological Process: regulation
of transcription from RNA polymerase II promoter (GO: 0006357)

| | | | |
|---|---|---|---|
| method | AccNumber | shortName | location |
| HMMPIR | PIRSF006704 | Transcription elongation factor, IIS type | T[2-368] 1.7e−125 |
| InterPro | NULL | NULL | |
| method | AccNumber | shortName | location |
| Gene3D | G3DSA: 2.20.25.10 | no description | T[299-368] 4.4e−20 |
| HMMPanther | PTHR11477 | TRANSCRIPTION ELONGATION FACTOR S-II | T[1-97] 8.4e−51 T[129-367] 8.4e−51 |
| Seg | seg | seg | ?[10-23] NA |
| superfamily | SSF57783 | Zinc beta-ribbon | T[305-367] 3.1e−21 |

Sequence ″ZM1S62075387″ crc64 checksum: 912650C1CC470182 length: 752 aa.

| InterPro | IPR008217 | Protein of unknown function DUF125, transmembrane | |
|---|---|---|---|
| method | AccNumber | shortName | location |
| HMMPfam | PF01988 | DUF125 | T[565-732] 7.099998842111971E−11 |

### Example 5

### Topology Prediction of the GRP Polypeptide Sequences

[0266] TargetP 1.1 predicts the subcellular location of eukaryotic proteins. The location assignment is based on the predicted presence of any of the N-terminal pre-sequences: chloroplast transit peptide (cTP), mitochondrial targeting peptide (mTP) or secretory pathway signal peptide (SP). Scores on which the final prediction is based are not really probabilities, and they do not necessarily add to one. However, the location with the highest score is the most likely according to TargetP, and the relationship between the scores (the reliability class) may be an indication of how certain the prediction is. The reliability class (RC) ranges from 1 to 5, where 1 indicates the strongest prediction. For the sequences predicted to contain an N-terminal presequence a potential cleavage site can also be predicted. TargetP is maintained at the server of the Technical University of Denmark.

[0267] A number of parameters must be selected before analysing a sequence, such as organism group (non-plant or plant), cutoff sets (none, predefined set of cutoffs, or user-specified set of cutoffs), and the calculation of prediction of cleavage sites (yes or no).

[0268] Results of TargetP 1.1 analysis of a selection of GRP polypeptide sequence from Table A are listed hereunder in Table B.

[0269] The “plant” organism group has been selected, no cutoffs defined, and the predicted length of the transit peptide requested.

TABLE B
TargetP 1.1 analysis of some polypeptide sequences listed in Table A,
represented by their identifier. Abbreviations: Len, Length; cTP, Chloroplastic transit
peptide; mTP, Mitochondrial transit peptide, SP, Secretory pathway signal peptide, other,
Other subcellular targeting, Loc, Predicted Location; RC, Reliability class; TPlen, Predicted
transit peptide length.

| Name | Len | cTP | mTP | SP | other | Loc | RC | TPlen |
|---|---|---|---|---|---|---|---|---|
| ZM1s55817549 | 361 | 0.056 | 0.334 | 0.056 | 0.728 | — | 4 | — |
| cutoff | | 0.000 | 0.000 | 0.000 | 0.000 | | | |
| ZM1S60958648 | 426 | 0.006 | 0.403 | 0.716 | 0.018 | S | 4 | 22 |
| cutoff | | 0.000 | 0.000 | 0.000 | 0.000 | | | |
| ZM1s60983186 | 491 | 0.009 | 0.431 | 0.084 | 0.775 | — | 4 | — |
| cutoff | | 0.000 | 0.000 | 0.000 | 0.000 | | | |
| ZM1S62018816 | 426 | 0.501 | 0.796 | 0.002 | 0.042 | M | 4 | 12 |
| cutoff | | 0.000 | 0.000 | 0.000 | 0.000 | | | |
| ZM1s62063823 | 390 | 0.192 | 0.035 | 0.646 | 0.012 | S | 3 | 25 |
| cutoff | | 0.000 | 0.000 | 0.000 | 0.000 | | | |
| ZM4s45895 | 119 | 0.026 | 0.527 | 0.062 | 0.138 | M | 4 | 102 |
| cutoff | | 0.000 | 0.000 | 0.000 | 0.000 | | | |
| ZM1s68704853 | 305 | 0.079 | 0.093 | 0.052 | 0.919 | — | 1 | — |
| cutoff | | 0.000 | 0.000 | 0.000 | 0.000 | | | |
| ZM4s07964 | 82 | 0.108 | 0.285 | 0.064 | 0.769 | — | 3 | — |
| cutoff | | 0.000 | 0.000 | 0.000 | 0.000 | | | |
| ZM1S65239103 | 300 | 0.105 | 0.058 | 0.040 | 0.882 | — | 2 | — |
| cutoff | | 0.000 | 0.000 | 0.000 | 0.000 | | | |
| ZM1s59258289 | 338 | 0.325 | 0.231 | 0.184 | 0.270 | C | 5 | 27 |
| cutoff | | 0.000 | 0.000 | 0.000 | 0.000 | | | |
| ZM1a68352777 | 563 | 0.038 | 0.249 | 0.146 | 0.370 | — | 5 | — |
| cutoff | | 0.000 | 0.000 | 0.000 | 0.000 | | | |
| ZM4s13278 | 610 | 0.136 | 0.210 | 0.181 | 0.436 | — | 4 | — |
| cutoff | | 0.000 | 0.000 | 0.000 | 0.000 | | | |
| ZM1s61040508 | 614 | 0.296 | 0.147 | 0.165 | 0.435 | — | 5 | — |
| cutoff | | 0.000 | 0.000 | 0.000 | 0.000 | | | |
| ZM1s62064657 | 312 | 0.072 | 0.219 | 0.049 | 0.886 | — | 2 | — |
| cutoff | | 0.000 | 0.000 | 0.000 | 0.000 | | | |
| ZM4s14568 | 368 | 0.131 | 0.047 | 0.052 | 0.913 | — | 2 | — |
| cutoff | | 0.000 | 0.000 | 0.000 | 0.000 | | | |
| ZM1s62075387 | 752 | 0.160 | 0.089 | 0.076 | 0.895 | — | 2 | — |
| cutoff | | 0.000 | 0.000 | 0.000 | 0.000 | | | |

[0270] Many other algorithms can be used to perform such analyses, including:
[0271] ChloroP 1.1 hosted on the server of the Technical University of Denmark;
[0272] Protein Prowler Subcellular Localisation Predictor version 1.2 hosted on the server of the Institute for Molecular Bioscience, University of Queensland, Brisbane, Australia;
[0273] PENCE Proteome Analyst PA-GOSUB 2.5 hosted on the server of the University of

[0274] Alberta, Edmonton, Alberta, Canada;
[0275] TMHMM, hosted on the server of the Technical University of Denmark
[0276] PSORT (URL: psort.org)
[0277] PLOC (Park and Kanehisa, Bioinformatics, 19, 1656-1663, 2003).

### Example 6

### Cloning of the GRP Encoding Nucleic Acid Sequence

[0278] The nucleic acid sequences was amplified by PCR using as template a custom-made Zea mays, Oryza sativa or Arabidopsis thaliana seedlings cDNA libraries. PCR was performed using a commercially available proofreading Taq DNA polymerase in standard conditions, using 200 ng of template in a 50 μl PCR mix. The primers used were designed using standard methods for gene specific amplification and included the AttB sites for Gateway recombination. The amplified PCR fragment was purified also using standard methods. The first step of the Gateway procedure, the BP reaction, was then performed, during which the PCR fragment recombined in vivo with the pDONR201 plasmid to produce, according to the Gateway terminology, an “entry clone”. Plasmid pDONR201 was purchased from Invitrogen, as part of the Gateway® technology.

[0279] The entry clone comprising the coding sequences provided in Table A was then used in an LR reaction with a destination vector used for Oryza sativa transformation. This vector contained as functional elements within the T-DNA borders: a plant selectable marker; a screenable marker expression cassette; and a Gateway cassette intended for LR in vivo recombination with the nucleic acid sequence of interest already cloned in the entry clone. In one set of experiments, the rice GOS2 promoter (SEQ ID NO: 643) for constitutive expression was located upstream of this Gateway cassette. In one embodiment, the Gateway cassette comprising the nucleic acid sequence of interest was designed for overexpressing the nucleic acid sequence of interest; in another embodiment, the Gateway cassette comprising the nucleic acid sequence of interest was designed for decreasing expression of the nucleic acid sequence of interest (as indicated in Table C). In another set of experiments, the CaMV-35S promoter for constitutive expression was located upstream of this Gateway cassette.

[0280] After the LR recombination step, the resulting expression vector was transformed into Agrobacterium strain LBA4044 according to methods well known in the art.

### Example 7

### Plant Transformation

### Rice Transformation

[0281] The Agrobacterium containing the expression vector was used to transform Oryza sativa plants. Mature dry seeds of the rice japonica cultivar Nipponbare were dehusked. Sterilization was carried out by incubating for one minute in 70% ethanol, followed by 30 to 60 minutes, preferably 30 minutes in sodium hypochlorite solution (depending on the grade of contamination), followed by a 3 to 6 times, preferably 4 time wash with sterile distilled water. The sterile seeds were then germinated on a medium containing 2,4-D (callus induction medium). After incubation in light for 6 days scutellum-derived calli is transformed with Agrobacterium as described herein below.

[0282] Agrobacterium strain LBA4404 containing the expression vector was used for co-cultivation. Agrobacterium was inoculated on AB medium with the appropriate antibiotics and cultured for 3 days at 28° C. The bacteria were then collected and suspended in liquid co-cultivation medium to a density (OD600) of about 1. The calli were immersed in the suspension for 1 to 15 minutes. The callus tissues were then blotted dry on a filter paper and transferred to solidified, co-cultivation medium and incubated for 3 days in the dark at 25° C. After washing away the Agrobacterium, the calli were grown on 2,4-D-containing medium for 10 to 14 days (growth time for indica: 3 weeks) under light at 28° C.-32° C. in the presence of a selection agent. During this period, rapidly growing resistant callus developed. After transfer of this material to regeneration media, the embryogenic potential was released and shoots developed in the next four to six weeks. Shoots were excised from the calli and incubated for 2 to 3 weeks on an auxin-containing medium from which they were transferred to soil. Hardened shoots were grown under high humidity and short days in a greenhouse.

[0283] Transformation of rice cultivar indica can also be done in a similar way as give above according to techniques well known to a skilled person.

[0284] 35 to 90 independent T0 rice transformants were generated for one construct. The primary transformants were transferred from a tissue culture chamber to a greenhouse. After a quantitative PCR analysis to verify copy number of the T-DNA insert, only single copy transgenic plants that exhibit tolerance to the selection agent were kept for harvest of T1 seed. Seeds were then harvested three to five months after transplanting. The method yielded single locus transformants at a rate of over 50% (Aldemita and Hodges 1996, Chan et al. 1993, Hiei et al. 1994).

### Example 8

### Transformation of Other Crops

### Corn Transformation

[0285] Transformation of maize (Zea mays) is performed with a modification of the method described by Ishida et al. (1996) Nature Biotech 14(6): 745-50. Transformation is genotype-dependent in corn and only specific genotypes are amenable to transformation and regeneration. The inbred line A188 (University of Minnesota) or hybrids with A188 as a parent are good sources of donor material for transformation, but other genotypes can be used successfully as well. Ears are harvested from corn plant approximately 11 days after pollination (DAP) when the length of the immature embryo is about 1 to 1.2 mm. Immature embryos are cocultivated with Agrobacterium tumefaciens containing the expression vector, and transgenic plants are recovered through organogenesis. Excised embryos are grown on callus induction medium, then maize regeneration medium, containing the selection agent (for example imidazolinone but various selection markers can be used). The Petri plates are incubated in the light at 25° C. for 2-3 weeks, or until shoots develop. The green shoots are transferred from each embryo to maize rooting medium and incubated at 25° C. for 2-3 weeks, until roots develop. The rooted shoots are transplanted to soil in the greenhouse. T1 seeds are produced from plants that exhibit tolerance to the selection agent and that contain a single copy of the T-DNA insert.

### Wheat Transformation

[0286] Transformation of wheat is performed with the method described by Ishida et al. (1996) Nature Biotech 14(6): 745-50. The cultivar Bobwhite (available from CIMMYT, Mexico) is commonly used in transformation. Immature embryos are co-cultivated with Agrobacterium tumefaciens containing the expression vector, and transgenic plants are recovered through organogenesis. After incubation with Agrobacterium, the embryos are grown in vitro on callus induction medium, then regeneration medium, containing the selection agent (for example imidazolinone but various selection markers can be used). The Petri plates are incubated in the light at 25° C. for 2-3 weeks, or until shoots develop. The green shoots are transferred from each embryo to rooting medium and incubated at 25° C. for 2-3 weeks, until roots develop. The rooted shoots are transplanted to soil in the greenhouse. T1 seeds are produced from plants that exhibit tolerance to the selection agent and that contain a single copy of the T-DNA insert.

### Soybean Transformation

[0287] Soybean is transformed according to a modification of the method described in the Texas A&M patent U.S. Pat. No. 5,164,310. Several commercial soybean varieties are amenable to transformation by this method. The cultivar Jack (available from the Illinois Seed foundation) is commonly used for transformation. Soybean seeds are sterilised for in vitro sowing. The hypocotyl, the radicle and one cotyledon are excised from seven-day old young seedlings. The epicotyl and the remaining cotyledon are further grown to develop axillary nodes. These axillary nodes are excised and incubated with Agrobacterium tumefaciens containing the expression vector. After the cocultivation treatment, the explants are washed and transferred to selection media. Regenerated shoots are excised and placed on a shoot elongation medium. Shoots no longer than 1 cm are placed on rooting medium until roots develop. The rooted shoots are transplanted to soil in the greenhouse. T1 seeds are produced from plants that exhibit tolerance to the selection agent and that contain a single copy of the T-DNA insert.

### Rapeseed/Canola Transformation

[0288] Cotyledonary petioles and hypocotyls of 5-6 day old young seedling are used as explants for tissue culture and transformed according to Babic et al. (1998, Plant Cell Rep 17: 183-188). The commercial cultivar Westar (Agriculture Canada) is the standard variety used for transformation, but other varieties can also be used. Canola seeds are surface-sterilized for in vitro sowing. The cotyledon petiole explants with the cotyledon attached are excised from the in vitro seedlings, and inoculated with Agrobacterium (containing the expression vector) by dipping the cut end of the petiole explant into the bacterial suspension. The explants are then cultured for 2 days on MSBAP-3 medium containing 3 mg/l BAP, 3% sucrose, 0.7 Phytagar at 23° C., 16 hr light. After two days of co-cultivation with Agrobacterium, the petiole explants are transferred to MSBAP-3 medium containing 3 mg/l BAP, cefotaxime, carbenicillin, or timentin (300 mg/l) for 7 days, and then cultured on MSBAP-3 medium with cefotaxime, carbenicillin, or timentin and selection agent until shoot regeneration. When the shoots are 5-10 mm in length, they are cut and transferred to shoot elongation medium (MSBAP-0.5, containing 0.5 mg/l BAP). Shoots of about 2 cm in length are transferred to the rooting medium (MS0) for root induction. The rooted shoots are transplanted to soil in the greenhouse. T1 seeds are produced from plants that exhibit tolerance to the selection agent and that contain a single copy of the T-DNA insert.

### Alfalfa Transformation

[0289] A regenerating clone of alfalfa (Medicago sativa) is transformed using the method of (McKersie et al., 1999 Plant Physiol 119: 839-847). Regeneration and transformation of alfalfa is genotype dependent and therefore a regenerating plant is required. Methods to obtain regenerating plants have been described. For example, these can be selected from the cultivar Rangelander (Agriculture Canada) or any other commercial alfalfa variety as described by Brown D C W and A Atanassov (1985. Plant Cell Tissue Organ Culture 4: 111-112). Alternatively, the RA3 variety (University of Wisconsin) has been selected for use in tissue culture (Walker et al., 1978 Am J Bot 65:654-659). Petiole explants are cocultivated with an overnight culture of Agrobacterium tumefaciens C58C1 pMP90 (McKersie et al., 1999 Plant Physiol 119: 839-847) or LBA4404 containing the expression vector. The explants are cocultivated for 3 d in the dark on SH induction medium containing 288 mg/L Pro, 53 mg/L thioproline, 4.35 g/L K2SO4, and 100 μm acetosyringinone. The explants are washed in half-strength Murashige-Skoog medium (Murashige and Skoog, 1962) and plated on the same SH induction medium without acetosyringinone but with a suitable selection agent and suitable antibiotic to inhibit Agrobacterium growth. After several weeks, somatic embryos are transferred to BOi2Y development medium containing no growth regulators, no antibiotics, and 50 g/L sucrose. Somatic embryos are subsequently germinated on half-strength Murashige-Skoog medium. Rooted seedlings were transplanted into pots and grown in a greenhouse. T1 seeds are produced from plants that exhibit tolerance to the selection agent and that contain a single copy of the T-DNA insert.

### Cotton Transformation

[0290] Cotton is transformed using Agrobacterium tumefaciens according to the method described in U.S. Pat. No. 5,159,135. Cotton seeds are surface sterilised in 3% sodium hypochlorite solution during 20 minutes and washed in distilled water with 500 μg/ml cefotaxime. The seeds are then transferred to SH-medium with 50 μg/ml benomyl for germination. Hypocotyls of 4 to 6 days old seedlings are removed, cut into 0.5 cm pieces and are placed on 0.8% agar. An Agrobacterium suspension (approx. 108 cells per ml, diluted from an overnight culture transformed with the gene of interest and suitable selection markers) is used for inoculation of the hypocotyl explants. After 3 days at room temperature and lighting, the tissues are transferred to a solid medium (1.6 g/l Gelrite) with Murashige and Skoog salts with B5 vitamins (Gamborg et al., Exp. Cell Res. 50:151-158 (1968)), 0.1 mg/l 2,4-D, 0.1 mg/l 6-furfurylaminopurine and 750 μg/ml MgCL2, and with 50 to 100 μg/ml cefotaxime and 400-500 μg/ml carbenicillin to kill residual bacteria. Individual cell lines are isolated after two to three months (with subcultures every four to six weeks) and are further cultivated on selective medium for tissue amplification (30° C., 16 hr photoperiod). Transformed tissues are subsequently further cultivated on non-selective medium during 2 to 3 months to give rise to somatic embryos. Healthy looking embryos of at least 4 mm length are transferred to tubes with SH medium in fine vermiculite, supplemented with 0.1 mg/l indole acetic acid, 6 furfurylaminopurine and gibberellic acid. The embryos are cultivated at 30° C. with a photoperiod of 16 hrs, and plantlets at the 2 to 3 leaf stage are transferred to pots with vermiculite and nutrients. The plants are hardened and subsequently moved to the greenhouse for further cultivation.

### Sugarbeet Transformation

[0291] Seeds of sugarbeet (Beta vulgaris L.) are sterilized in 70% ethanol for one minute followed by 20 min. shaking in 20% Hypochlorite bleach e.g. Clorox® regular bleach (commercially available from Clorox, 1221 Broadway, Oakland, Calif. 94612, USA). Seeds are rinsed with sterile water and air dried followed by plating onto germinating medium (Murashige and Skoog (MS) based medium (Murashige, T., and Skoog., 1962. Physiol. Plant, vol. 15, 473-497) including B5 vitamins (Gamborg et al.; Exp. Cell Res., vol. 50, 151-8.) supplemented with 10 g/l sucrose and 0.8% agar). Hypocotyl tissue is used essentially for the initiation of shoot cultures according to Hussey and Hepher (Hussey, G., and Hepher, A., 1978. Annals of Botany, 42, 477-9) and are maintained on MS based medium supplemented with 30 g/l sucrose plus 0.25 mg/l benzylamino purine and 0.75% agar, pH 5.8 at 23-25° C. with a 16-hour photoperiod. Agrobacterium tumefaciens strain carrying a binary plasmid harbouring a selectable marker gene, for example nptII, is used in transformation experiments. One day before transformation, a liquid LB culture including antibiotics is grown on a shaker (28° C., 150 rpm) until an optical density (O.D.) at 600 nm of ˜1 is reached. Overnight-grown bacterial cultures are centrifuged and resuspended in inoculation medium (O.D.˜1) including Acetosyringone, pH 5.5. Shoot base tissue is cut into slices (1.0 cm×1.0 cm×2.0 mm approximately). Tissue is immersed for 30 s in liquid bacterial inoculation medium. Excess liquid is removed by filter paper blotting. Co-cultivation occurred for 24-72 hours on MS based medium incl. 30 g/l sucrose followed by a non-selective period including MS based medium, 30 g/l sucrose with 1 mg/l BAP to induce shoot development and cefotaxim for eliminating the Agrobacterium. After 3-10 days explants are transferred to similar selective medium harbouring for example kanamycin or G418 (50-100 mg/l genotype dependent). Tissues are transferred to fresh medium every 2-3 weeks to maintain selection pressure. The very rapid initiation of shoots (after 3-4 days) indicates regeneration of existing meristems rather than organogenesis of newly developed transgenic meristems. Small shoots are transferred after several rounds of subculture to root induction medium containing 5 mg/l NAA and kanamycin or G418. Additional steps are taken to reduce the potential of generating transformed plants that are chimeric (partially transgenic). Tissue samples from regenerated shoots are used for DNA analysis. Other transformation methods for sugarbeet are known in the art, for example those by Linsey & Gallois (Linsey, K., and Gallois, P., 1990. Journal of Experimental Botany; vol. 41, No. 226; 529-36) or the methods published in the international application published as WO9623891A.

### Sugarcane Transformation

[0292] Spindles are isolated from 6-month-old field grown sugarcane plants (Arencibia et al., 1998. Transgenic Research, vol. 7, 213-22; Enriquez-Obregon et al., 1998. Planta, vol. 206, 20-27). Material is sterilized by immersion in a 20% Hypochlorite bleach e.g. Clorox® regular bleach (commercially available from Clorox, 1221 Broadway, Oakland, Calif. 94612, USA) for 20 minutes. Transverse sections around 0.5 cm are placed on the medium in the top-up direction. Plant material is cultivated for 4 weeks on MS (Murashige, T., and Skoog., 1962. Physiol. Plant, vol. 15, 473-497) based medium incl. B5 vitamins (Gamborg, O., et al., 1968. Exp. Cell Res., vol. 50, 151-8) supplemented with 20 g/l sucrose, 500 mg/l casein hydrolysate, 0.8% agar and 5 mg/l 2,4-D at 23° C. in the dark. Cultures are transferred after 4 weeks onto identical fresh medium. Agrobacterium tumefaciens strain carrying a binary plasmid harbouring a selectable marker gene, for example hpt, is used in transformation experiments. One day before transformation, a liquid LB culture including antibiotics is grown on a shaker (28° C., 150 rpm) until an optical density (O.D.) at 600 nm of ˜0.6 is reached. Overnight-grown bacterial cultures are centrifuged and resuspended in MS based inoculation medium (O.D.˜0.4) including acetosyringone, pH 5.5. Sugarcane embryogenic callus pieces (2-4 mm) are isolated based on morphological characteristics as compact structure and yellow colour and dried for 20 min. in the flow hood followed by immersion in a liquid bacterial inoculation medium for 10-20 minutes. Excess liquid is removed by filter paper blotting. Co-cultivation occurred for 3-5 days in the dark on filter paper which is placed on top of MS based medium incl. B5 vitamins containing 1 mg/l 2,4-D. After co-cultivation calli are washed with sterile water followed by a non-selective cultivation period on similar medium containing 500 mg/l cefotaxime for eliminating remaining Agrobacterium cells. After 3-10 days explants are transferred to MS based selective medium incl. B5 vitamins containing 1 mg/l 2,4-D for another 3 weeks harbouring 25 mg/l of hygromycin (genotype dependent). All treatments are made at 23° C. under dark conditions. Resistant calli are further cultivated on medium lacking 2,4-D including 1 mg/l BA and 25 mg/l hygromycin under 16 h light photoperiod resulting in the development of shoot structures. Shoots are isolated and cultivated on selective rooting medium (MS based including, 20 g/l sucrose, 20 mg/l hygromycin and 500 mg/l cefotaxime). Tissue samples from regenerated shoots are used for DNA analysis. Other transformation methods for sugarcane are known in the art, for example from the in-ternational application published as WO2010/151634A and the granted European patent EP1831378.

### Example 9

### Phenotypic Evaluation Procedure

### 9.1 Evaluation Setup

[0293] 35 to 90 independent T0 rice transformants were generated. The primary transformants were transferred from a tissue culture chamber to a greenhouse for growing and harvest of T1 seed. Six events, of which the T1 progeny segregated 3:1 for presence/absence of the transgene, were retained. For each of these events, approximately 10 T1 seedlings containing the transgene (hetero- and homo-zygotes) and approximately 10 T1 seedlings lacking the transgene (nullizygotes) were selected by monitoring visual marker expression. The transgenic plants and the corresponding nullizygotes were grown side-by-side at random positions. Greenhouse conditions were of shorts days (12 hours light), 28° C. in the light and 22° C. in the dark, and a relative humidity of 70%. Plants grown under non-stress conditions were watered at regular intervals to ensure that water and nutrients were not limiting and to satisfy plant needs to complete growth and development, unless they were used in a stress screen.

[0294] From the stage of sowing until the stage of maturity the plants were passed several times through a digital imaging cabinet. At each time point digital images (2048×1536 pixels, 16 million colours) were taken of each plant from at least 6 different angles.

[0295] T1 events can be further evaluated in the T2 generation following the same evaluation procedure as for the T1 generation, e.g. with less events and/or with more individuals per event.

### Drought Screen

[0296] T1 or T2 plants were grown in potting soil under normal conditions until they approached the heading stage. They were then transferred to a “dry” section where irrigation was withheld. Soil moisture probes were inserted in randomly chosen pots to monitor the soil water content (SWC). When SWC went below certain thresholds, the plants were automatically re-watered continuously until a normal level was reached again. The plants were then re-transferred again to normal conditions. The rest of the cultivation (plant maturation, seed harvest) was the same as for plants not grown under abiotic stress conditions. Growth and yield parameters were recorded as detailed for growth under normal conditions.

### Nitrogen Use Efficiency Screen

[0297] T1 or T2 plants were grown in potting soil under normal conditions except for the nutrient solution. The pots were watered from transplantation to maturation with a specific nutrient solution containing reduced N nitrogen (N) content, usually between 7 to 8 times less. The rest of the cultivation (plant maturation, seed harvest) was the same as for plants not grown under abiotic stress. Growth and yield parameters were recorded as detailed for growth under normal conditions.

### Salt Stress Screen

[0298] T1 or T2 plants are grown on a substrate made of coco fibers and particles of baked clay (Argex) (3 to 1 ratio). A normal nutrient solution is used during the first two weeks after transplanting the plantlets in the greenhouse. After the first two weeks, 25 mM of salt (NaCl) is added to the nutrient solution, until the plants are harvested. Growth and yield parameters are recorded as detailed for growth under normal conditions.

### 9.2 Statistical Analysis: F Test

[0299] A two factor ANOVA (analysis of variants) was used as a statistical model for the overall evaluation of plant phenotypic characteristics. An F test was carried out on all the parameters measured of all the plants of all the events transformed with the gene of the present invention. The F test was carried out to check for an effect of the gene over all the transformation events and to verify for an overall effect of the gene, also known as a global gene effect. The threshold for significance for a true global gene effect was set at a 5% probability level for the F test. A significant F test value points to a gene effect, meaning that it is not only the mere presence or position of the gene that is causing the differences in phenotype.

### 9.3 Parameters Measured

[0300] From the stage of sowing until the stage of maturity the plants were passed several times through a digital imaging cabinet. At each time point digital images (2048×1536 pixels, 16 million colours) were taken of each plant from at least 6 different angles as described in WO2010/031780. These measurements were used to determine different parameters.

### Biomass-Related Parameter Measurement

[0301] The plant aboveground area (or leafy biomass) was determined by counting the total number of pixels on the digital images from aboveground plant parts discriminated from the background. This value was averaged for the pictures taken on the same time point from the different angles and was converted to a physical surface value expressed in square mm by calibration. Experiments show that the aboveground plant area measured this way correlates with the biomass of plant parts above ground. The above ground area is the area measured at the time point at which the plant had reached its maximal leafy biomass.

[0302] Increase in root biomass is expressed as an increase in total root biomass (measured as maximum biomass of roots observed during the lifespan of a plant); or as an increase in the root/shoot index, measured as the ratio between root mass and shoot mass in the period of active growth of root and shoot. In other words, the root/shoot index is defined as the ratio of the rapidity of root growth to the rapidity of shoot growth in the period of active growth of root and shoot. Root biomass can be determined using a method as described in WO 2006/029987.

### Parameters Related to Development Time

[0303] The early vigour is the plant aboveground area three weeks post-germination. Early vigour was determined by counting the total number of pixels from aboveground plant parts discriminated from the background. This value was averaged for the pictures taken on the same time point from different angles and was converted to a physical surface value expressed in square mm by calibration.

[0304] AreaEmer is an indication of quick early development when this value is decreased compared to control plants. It is the ratio (expressed in %) between the time a plant needs to make 30% of the final biomass and the time needs to make 90% of its final biomass.

[0305] The “time to flower” or “flowering time” of the plant can be determined using the method as described in WO 2007/093444.

### Seed-Related Parameter Measurements

[0306] The mature primary panicles were harvested, counted, bagged, barcode-labelled and then dried for three days in an oven at 37° C. The panicles were then threshed and all the seeds were collected and counted. The seeds are usually covered by a dry outer covering, the husk. The filled husks (herein also named filled florets) were separated from the empty ones using an air-blowing device. The empty husks were discarded and the remaining fraction was counted again. The filled husks were weighed on an analytical balance.

[0307] The total number of seeds was determined by counting the number of filled husks that remained after the separation step. The total seed weight (Seed Yield in Table C) was measured by weighing all filled husks harvested from a plant.

[0308] The total number of seeds (or florets) per plant was determined by counting the number of husks (whether filled or not) harvested from a plant.

[0309] Thousand Kernel Weight (TKW) is extrapolated from the number of seeds counted and their total weight.

[0310] The Harvest Index (HI) in the present invention is defined as the ratio between the total seed weight and the above ground area (mm²), multiplied by a factor 10⁶.

[0311] The number of flowers per panicle as defined in the present invention is the ratio between the total number of seeds over the number of mature primary panicles.

[0312] The “seed fill rate” or “seed filling rate” as defined in the present invention is the proportion (expressed as a %) of the number of filled seeds (i.e. florets containing seeds) over the total number of seeds (i.e. total number of florets). In other words, the seed filling rate is the percentage of florets that are filled with seed.

### Example 10

### Results of the Phenotypic Evaluation of the Transgenic Plants

[0313] The results of the evaluation of transgenic rice plants in the T1 generation and expressing a nucleic acid encoding a GRP polypeptide as given in Table A are presented below in Table C. In a number of cases the gene of interest was downregulated, indicated in the comumn “expression”. In the Yield screen, plants were grown under optimal conditions, in the Nitrogen screen, plants were grown under reduced nutrient availability as described above, in the Drought screen, plants were subjected to reduced water availability, as described above.

TABLE C
Data summary for transgenic T1 rice plants; for each parameter, the phenotype is indicated as follows: ++++: at least 4 positive
events with a positive difference >5%, p < 0.2 for any of the parameters indicated, +++: 3 positive events with a positive difference >5%,
p < 0.1, ++: 2 positive events with a positive difference >10%, p < 0.1.

| | Protein | | | | | |
|---|---|---|---|---|---|---|
| Identifier | SEQ ID NO: | Phenotype ++++ | Phenotype +++ | Phenotype ++ | Screen | Expression |
| Orysa_CBS domain | 4 | | | Flowers per panicle | Yield | downregulation |
| containing membrane | | | | | | |
| protein | | | | | | |
| Orysa_LOC_Os01g06640 | 8 | | Seed yield | Biomass, Number of | Yield | downregulation |
| | | | | flowers, Fillrate, | | |
| | | | | Harvest index; Seed | | |
| | | | | size (TKW) | | |
| Orysa_LOC_Os01g63690 | 10 | | Seed yield, | | Yield | downregulation |
| | | | Fillrate, Harvest | | | |
| | | | index, Number of | | | |
| | | | filled seeds | | | |
| Orysa_LOC_Os02g36490 | 28 | | | Harvest index | Yield | downregulation |
| Orysa_LOC_Os02g52560 | 34 | | | Fillrate, Harvest index | Yield | downregulation |
| Orysa_LOC_Os03g 10210 | 40 | | Fillrate | | Yield | downregulation |
| Orysa_LOC_Os03g 17790 | 44 | | | Biomass | Yield | downregulation |
| Orysa_LOC_Os03g17800 | 46 | | Seed yield, | Fillrate, Harvest Index, | Yield | downregulation |
| | | | number of filled | Flowers per panicle | | |
| | | | seeds | | | |
| Orysa_LOC_Os03g46490 | 48 | Flowers per | | Seed Yield, Number of | Yield | downregulation |
| | | panicle | | flowers | | |
| Orysa_LOC_Os03g55670 | 50 | | | Fillrate | Yield | downregulation |
| Orysa_LOC_Os04g35790 | 54 | | | Fillrate, Harvest index | Yield | downregulation |
| Orysa_LOC_Os05g07070 | 56 | | | Seed yield, Fillrate, | Yield | downregulation |
| | | | | number of filled seeds | | |
| Orysa_LOC_Os05g40770 | 58 | | Harvest Index | Seed yield, Fillrate, | yield | downregulation |
| | | | | Seed size (TKW), | | |
| | | | | Number of filled seeds | | |
| Orysa_LOC_Os06g01440 | 62 | Seed Yield, | | | yield | downregulation |
| | | Fillrate, Harvest | | | | |
| | | Index, Number of | | | | |
| | | filled seeds | | | | |
| Orysa_LOC_Os06g06250.2 | 66 | | | Fillrate | Yield | downregulation |
| Orysa_LOC_Os08g01760 | 74 | | | Seed yield, Number of | Yield | downregulation |
| | | | | flowers, Fillrate, | | |
| | | | | Harvest index, Number | | |
| | | | | of panicles | | |
| Orysa_LOC_Os08g26870 | 76 | | | Fillrate, Harvest index | Yield | downregulation |
| Orysa_LOC_Os10g39130 | 92 | | | Number of flowers | Nitrogen | downregulation |
| Orysa_WRKY7 | 108 | | | Seed yield, Fillrate, | Drought | downregulation |
| | | | | Harvest index, Number | | |
| | | | | of panicles, Number of | | |
| | | | | filled seeds | | |
| Zeama_GRMZM2G005260 | 128 | | | Fillrate | Drought | normal |
| Zeama_GRMZM2G005435 | 130 | | | Seed siz (TKW) | Drought | normal |
| Zeama_GRMZM2G010356_ | 144 | | | Fillrate | Yield | normal |
| T01 | | | | | | |
| Zeama_GRMZM2G012224_ | 150 | Fillrate | | | Nitrogen | normal |
| T01 | | | | | | |
| Zeama_GRMZM2G013627 | 152 | | | Seed yield, Fillrate, | Drought | normal |
| | | | | Harvest index, Number | | |
| | | | | of panicles, Number of | | |
| | | | | filled seeds | | |
| Zeama_GRMZM2G014750 | 156 | | | Seed yield, Number of | Drought | normal |
| | | | | flowers, Fillrate, | | |
| | | | | Harvest index, Flowers | | |
| | | | | per panicle | | |
| Zeama_GRMZM2G015433 | 158 | | Biomass | | Nitrogen | normal |
| Zeama_GRMZM2G020281_ | 166 | | | Seed yield, Fillrate, | yield | normal |
| T03 | | | | Harvest index, Seed | | |
| | | | | size (TKW), Number of | | |
| | | | | filled seeds | | |
| Zeama_GRMZM2G028218 | 176 | | | Seed size (TKW) | Yield | normal |
| Zeama_GRMZM2G031724 | 182 | Root Shoot Index | | | Drought | normal |
| Zeama_GRMZM2G031983_ | 184 | Seed size (TKW) | Fillrate | Harvest Index | Yield | normal |
| T01 | | | | | | |
| Zeama_GRMZM2G037001_ | 196 | | | Harvest index, Seed | Yield | normal |
| T01 | | | | size (TKW), Number of | | |
| | | | | Panicles | | |
| Zeama_GRMZM2G040517_ | 200 | | | Seed yield, Harvest | Nitrogen | normal |
| T01 | | | | index, Number of filled | | |
| | | | | seeds | | |
| Zeama_GRMZM2G043147 | 206 | | | Seed yield, Fillrate, | Drought | normal |
| | | | | Harvest index, Number | | |
| | | | | of filled seeds | | |
| Zeama_GRMZM2G044027_ | 210 | | Biomass, | Seed yield, number of | Yield | normal |
| T01 | | | Number of | panicles, flowers per | | |
| | | | flowers | panicle | | |
| Zeama_GRMZM2G047684 | 216 | Root Shoot Index | | | Nitrogen | normal |
| Zeama_GRMZM2G049398_ | 220 | Fillrate, Harvest | | Seed Yield, number of | Yield | normal |
| T01 | | index | | filled seeds | | |
| Zeama_GRMZM2G053766 | 226 | | Number of | | Drought | normal |
| | | | Panicles | | | |
| Zeama_GRMZM2G055585 | 230 | Fillrate | Harvest Index | Seed Yield | Drought | normal |
| Zeama_GRMZM2G058690_ | 242 | | Biomass | Number of panicles | Yield | normal |
| T02 | | | | | | |
| Zeama_GRMZM2G059580 | 244 | | | Fillrate | Drought | normal |
| Zeama_GRMZM2G059799 | 246 | | | Flowers per panicle | Drought | normal |
| Zeama_GRMZM2G061745 | 250 | | | Seed yield, Fillrate, | Drought | normal |
| | | | | Number of filled seeds | | |
| Zeama_GRMZM2G061996_ | 252 | | | Seed yield, Fillrate, | Yield | normal |
| T01 | | | | Harvest index, Number | | |
| | | | | of filled seeds | | |
| Zeama_GRMZM2G062160 | 254 | | Fillrate, Number | Seed yield, Harvest | Drought | normal |
| | | | of filled seeds | index | | |
| Zeama_GRMZM2G062531 | 256 | | Flowers per | | Drought | normal |
| | | | panicle | | | |
| Zeama_GRMZM2G077458 | 270 | | | Seed yield, Fillrate, | Drought | normal |
| | | | | number of filled seeds | | |
| Zeama_GRMZM2G087323 | 292 | | | Seed yield, Number of | Drought | normal |
| | | | | filled seeds | | |
| Zeama_GRMZM2G092137 | 306 | | | Seed size (TKW) | Nitrogen | normal |
| Zeama_GRMZM2G101390 | 326 | | Biomass | | Nitrogen | normal |
| Zeama_GRMZM2G102356 | 332 | | | Fillrate, Number of | Drought | normal |
| | | | | panicles | | |
| Zeama_GRMZM2G104610_ | 336 | | | Fillrate | Yield | normal |
| T01 | | | | | | |
| Zeama_GRMZM2G105331 | 338 | | | Number of panicles | Drought | normal |
| Zeama_GRMZM2G105348 | 340 | | Number of filled | Seed yield, fillrate, | Drought | normal |
| | | | seeds | harvest index | | |
| Zeama_GRMZM2G107839 | 346 | | | Seed yield, Fillrate, | Drought | normal |
| | | | | Harvest index | | |
| Zeama_GRMZM2G108716 | 350 | Seed Yield, | | | Drought | normal |
| | | Fillrate, Harvest | | | | |
| | | Index, Number of | | | | |
| | | filled seeds | | | | |
| Zeama_GRMZM2G110289 | 354 | | | Biomass, Seed yield | Nitrogen | normal |
| Zeama_GRMZM2G112210 | 358 | | | Number of panicles | Drought | normal |
| Zeama_GRMZM2G115975 | 368 | | | Seed yield, Fillrate, | Drought | normal |
| | | | | Harvest index | | |
| Zeama_GRMZM2G116632_ | 372 | | | Fillrate | Yield | normal |
| T01 | | | | | | |
| Zeama_GRMZM2G119906 | 376 | | | Seed size (TKW) | Nitrogen | normal |
| Zeama_GRMZM2G126397 | 388 | | | Seed yield, Fillrate | Drought | normal |
| Zeama_GRMZM2G126566 | 390 | Flowers per | | | Drought | normal |
| | | panicle | | | | |
| Zeama_GRMZM2G127850_ | 396 | fillrate, harvest | | Seed size (TKW), seed | yield | normal |
| T01 | | index, number of | | yield | | |
| | | filled seeds | | | | |
| Zeama_GRMZM2G127893 | 398 | | | Seed yield, Fillrate, | Drought | normal |
| | | | | Harvest index, number | | |
| | | | | of filled seeds | | |
| Zeama_GRMZM2G137596_ | 402 | | | Emergence Vigor, | Yield | normal |
| T01 | | | | Flowers per panicle | | |
| Zeama_GRMZM2G156110_ | 422 | | | Emergence Vigor, | Yield | normal |
| T01 | | | | Seed yield, Fillrate, | | |
| | | | | Harvest index, Seed | | |
| | | | | size (TKW), Number of | | |
| | | | | filled seeds | | |
| Zeama_GRMZM2G159034 | 428 | | | Seed yield, Fillrate, | Drought | normal |
| | | | | Harvest index, Number | | |
| | | | | of filled seeds | | |
| Zeama_GRMZM2G161295 | 430 | | | Flowers per panicle | Nitrogen | normal |
| Zeama_GRMZM2G163406 | 432 | | | Fillrate, Number of | Drought | normal |
| | | | | panicles | | |
| Zeama_GRMZM2G174558 | 454 | | Flowers per | Root Shoot Index | Nitrogen | normal |
| | | | panicle | | | |
| Zeama_GRMZM2G178815_ | 464 | | Fillrate | Seed yield, Harvest | Nitrogen | normal |
| T01 | | | | index | | |
| Zeama_GRMZM2G180172 | 468 | Biomass | | | Nitrogen | normal |
| Zeama_GRMZM2G302245_ | 470 | | Seed size (TKW) | | Yield | normal |
| T01 | | | | | | |
| Zeama_GRMZM2G334181_ | 486 | | Fillrate | Seed yield, Harvest | yield | normal |
| T01 | | | | index | | |
| Zeama_GRMZM2G340130 | 488 | | Seed size (TKW) | | Nitrogen | normal |
| Zeama_GRMZM2G347043 | 494 | Seed size (TKW) | | | Nitrogen | normal |
| Zeama_GRMZM2G355752 | 498 | | | Fillrate | Drought | normal |
| Zeama_GRMZM2G359952 | 500 | | Flowers per | | Nitrogen | normal |
| | | | panicle | | | |
| Zeama_GRMZM2G401521 | 506 | | Biomass | Seed yield, Fillrate, | Nitrogen | normal |
| | | | | number of filled seeds | | |
| Zeama_GRMZM2G413337 | 518 | | | Flowers per panicle | Nitrogen | normal |
| Zeama_GRMZM2G447984 | 530 | | | Harvest index, Number | Nitrogen | normal |
| | | | | of panicles | | |
| Zeama_GRMZM2G479260 | 544 | | | Seed yield, Fillrate | Drought | normal |
| Zeama_GRMZM2G481888_ | 546 | | | Biomass, RootMax, | Yield | normal |
| T01 | | | | Fillrate | | |
| Zeama_nucleic acid binding | 554 | | Fillrate | Harvest Index | Yield | normal |
| /zinc ion binding | | | | | | |
| Zeama_putative zinc-finger | 560 | | | Biomass, Fillrate, | Yield | normal |
| protein | | | | Number of filled seeds | | |
| Zeama_SYTE like | 562 | | | Harvest index | Drought | normal |
| Zeama_unknown protein a | 566 | | | Seed size (TKW) | Drought | normal |
| Zeama_unknown protein b | 568 | | | Emergence Vigor, | Drought | normal |
| | | | | Fillrate, Seed size | | |
| | | | | (TKW) | | |
| Zeama_Unknown protein e | 574 | | | Seed yield, Fillrate | Drought | normal |
| Zeama_unknown protein g | 578 | | | Flowers per panicle | Drought | normal |
| Zeama_ZM1s61996727 | 590 | | Biomass | RootMax | Nitrogen | normal |
| Zm ATP-binding protein | 596 | | | Seed yield, Fillrate, | Drought | normal |
| | | | | Harvest index, Number | | |
| | | | | of filled seeds | | |
| Zm embryo-abundant | 602 | | Seed size (TKW) | Seed yield, Fillrate, | Drought | normal |
| protein-related | | | | Harvest index, Number | | |
| | | | | of filled seeds | | |
| Zm indole-3-acetic acid | 606 | Root Shoot Index | | | Drought | normal |
| amido synthetase-like 1 | | | | | | |
| Zm indole-3-acetic acid | 608 | Root Shoot Index | | | Drought | normal |
| amido synthetase-like 2 | | | | | | |
| Zm indoleacetic acid- | 610 | | | Seed size (TKW) | Drought | normal |
| induced protein 13-like 1 | | | | | | |
| Zm indoleacetic acid- | 612 | | | Seed yield, Fillrate, | Drought | normal |
| induced protein 13-like 2 | | | | Harvest index, Number | | |
| | | | | of filled seeds | | |
| Zm indoleacetic acid- | 614 | | | Fillrate, Seed size | Drought | normal |
| induced protein 18 | | | | (TKW) | | |
| Zm indoleacetic acid- | 616 | | | Seed yield, Harvest | Drought | normal |
| induced protein 20-like | | | | index | | |
| Zm PHYTOCHROME- | 620 | | | Biomass, seed yield, | Drought | normal |
| ASSOCIATED PROTEIN 1- | | | | seed size (TKW) | | |
| like | | | | | | |
| Zm protein kinase-related | 626 | Fillrate, Seed | Seed Yield | Harvest Index | Yield | normal |
| | | size (TKW) | | | | |
| Zm protein kinase-related | 626 | Seed size (TKW) | Seed Yield | Fillrate, Harvest Index, | Drought | normal |
| | | | | number of filled seeds | | |

### Example 11

### Phenotypical Analysis of Arabidopsis Transformed with GRP Encoding Sequences

[0314] In order to analyse the potential role of selected genes in root development, a detailed analysis of the root system architecture was performed on transgenic Arabidopsis lines expressing the maize transcripts.

[0315] Entry clones were prepared by cloning the Zea mais coding sequence in pDONRTM221 or PDONRTM/Zeo as described in Example 7. Ectopic over-expression in Arabidopsis was obtained by cloning the coding sequence in pK7WG2 destination vectors, under control of the 35S promoter (Karimi et al., Trends in plant science 7(5): 193-195, 2002), or in a destination vector with the UAS promoter, which was transformed by floral dip (Clough and Bent, The Plant journal 16(6): 735-743, 1998) in Arabidopsis thaliana (L.) Heyhn. plants, ecotype Col0. In subsequent generations single-insert and homozygous lines were selected by growth on selective medium. For xylem-pole pericycle specific expression, vectors were prepared by cloning the required fragments into pH7m24GW or pB7m24GW (Karimi et al., Plant physiology, 145, 1144-1154, 2007; Hilson, Trends in plant science, 11, 133-141, 2006) which were transformed into plants from the J0121 GAL4 enhancer-trap line (Laplaze et al., 2005).

[0316] For phenotypic analyses Arabidopsis thaliana seeds (7 to 15 plants) were sown on solid 0.5×MS medium in square Petri dishes in near-vertical position and after 48h stratification at 4° C., incubated in a growth chamber at 22° C. under continuous light conditions (110 μE·m⁻²·s⁻¹ photosynthetically active radiation, supplied by cool-white fluorescent tungsten tubes; Osram) till 10 days after germination (DAG). Lines were not grouped per construct but analysed randomly, depending on seed availability and capacity. In each experiment a Col0 was included as a reference, which was grown for one generation under the same conditions as the transgenic lines.

[0317] The number of emerged lateral roots (LR) was counted and a high resolution scan was made from the plates with a flatbed scanner (Epson Perfection V700 Photo). Scans were analysed with ImageJ (http://rsbweb.nih.gov/) and WinRHIZO (Regent Instruments) software, which was used to measure the total length of the root system. Through image analyses, primary root length (PR) was measured (expressed in cm) and size of the naked zone (in cm), which is the distance between the root tip and the youngest emerged lateral. The lateral root density (LRD) was calculated by dividing the number of laterals by the length of the primary root minus the naked zone. Average values were calculated per line and are represented as percentages compared to the non-transformed Col0 control. Data are presented in Table D and Table E.

TABLE D
Data summary for transgenic Arabidopsis plants screend for lateral root initiation
on the primary root; for each parameter the increase is shown as: + = 0-10%, ++ = 10-20%,
+++ = 20-30%, ++++ = >30%; for the scores between brackets the p-value was ≦0.05,
otherwise the p-value was ≦0.01.

| Identifier | Expression | Line nr | PR | LR | LRD | Total Root Length |
|---|---|---|---|---|---|---|
| ZM1s60983186 | 35S-up | 2 | ++ | +++ | (+) | |
| ZM1s68382282 | 35S-up | 1 | (++) | ++ | | |
| | 35S-up | 2 | (++) | (+++) | | |
| | 35S-up | 3 | | | (+) | |
| | 35S-up | 4 | | | + | |
| ZM1s57394235 | 35S-up | 1 | | | (++) | |
| | 35S-up | 3 | + | | | |
| | 35S-up | 4 | ++ | | | |
| ZM1s62016945 | 35S-up | 1 | ++ | ++++ | (++++) | |
| | 35S-up | 2 | | (++++) | (++++) | |
| | 35S-up | 4 | | | ++ | |
| | 35S-up | 5 | +++ | +++ | | |
| ZM1s58194594 | UAS-up | 1 | | ++ | | |
| ZM1s62122111 | 35S-up | 4 | | | | (+++) |
| | 35S-up | 5 | | (++) | | (++++) |
| ZM4s18277 | UAS-up | 1 | (++) | | ++ | |
| ZM1s61987040 | 35S-up | 2 | | | ++ | |
| | 35S-up | 3 | | | +++ | |
| ZM1s62111342 | 35S-up | 3 | | | | (++) |
| | 35S-up | 5 | | | | (++) |
| ZM3s00628 | 35S-up | 1 | +++ | ++++ | ++ | (++++) |
| | 35S-up | | | | | |

[0318] In addition, the Arabidopsis knock out line SALK_{—}022198 (downregulation of the Ara orthologue of ZM1s62132790 (At5g64810, SEQ ID NO: 641) showed improved root growth: the primary root length was increased with 17.5%, the lateral root number was increased with 16.0% and the total root length was 26.8% increased.

TABLE E
Data summary for transgenic Arabidopsis plants screend for lateral root initiation
on the adventitious root; for each parameter the increase is shown as: + = 0-10%, ++ = 10-
20%, +++ = 20-30%, ++++ = >30%; for the scores between brackets the p-value was
≦0.05, otherwise the p-value was ≦0.01. For the adventitious roots, calculations for the LRD
were made with or without taking the naked zone into account (respectively indicated by
+NZ or −NZ).

| | | | | | LRD | LRD | Total Root |
|---|---|---|---|---|---|---|---|
| Identifier | Expression | Line nr | PR | LR | −NZ | +NZ | Length |
| ZM4s18047 | 35S-up | 1 | ++ | +++ | | | |
| | 35S-up | 4 | (+) | (++) | | | |
| ZM1s61992039 | 35S-up | 1 | | (++) | | (++) | |
| | 35S-up | 4 | | +++ | ++ | ++ | |
| | 35S-up | 5 | ++ | +++ | | (++) | |
| ZM4s07707 | 35S-up | 2 | | (++) | (+) | (+) | |
| | 35S-up | 3 | ++ | +++ | ++ | ++ | |
| | 35S-up | 4 | ++ | +++ | | (+) | |
| | 35S-up | 5 | ++ | +++ | (+) | (+) | |
| ZM1s57368153 | 35S-up | 3 | ++ | | | | |
| | 35S-up | 4 | ++ | (++) | | | (++++) |
| ZM1s62202989 | 35S-up | 1 | | | (+) | | |
| | 35S-up | 2 | ++ | ++ | | | |
| | 35S-up | 4 | ++ | (++) | | | |
| ZM1s57508357 | 35S-up | 1 | | | +++ | +++ | |
| | 35S-up | 2 | | | ++ | +++ | |
| | 35S-up | 3 | | | ++ | ++ | |
| | 35S-up | 4 | | | (+) | + | |
| ZM1s62258567 | 35S-up | 1 | + | | | | |
| | 35S-up | 4 | ++ | ++ | (+) | | +++ |
| | 35S-up | 5 | | | (+) | | |
| ZM1a62154780 | 35S-up | 1 | +++ | ++++ | +++ | ++ | (++++) |
| | 35S-up | 2 | ++++ | ++++ | ++ | +++ | (++++) |
| | 35S-up | 3 | (+) | +++ | ++ | ++ | |
| | 35S-up | 4 | ++ | ++++ | +++ | +++ | |
| | 35S-up | 5 | +++ | ++++ | +++ | +++ | ++++ |
| | 35S-up | 6 | | (++) | (+) | (++) | |
| | 35S-up | 7 | ++ | +++ | (++) | ++ | |
| | 35S-up | 9 | ++ | ++++ | ++ | ++ | |
| | 35S-up | 10 | | (++) | (+) | (+) | |
| ZM3s01330 | 35S-up | 1 | | (+) | | | |
| | 35S-up | 3 | (+) | | | | |
| | 35S-up | 5 | (+) | (++) | | | (+++) |
| ZM4s29494 | 35S-up | 3 | | | + | | |
| | 35S-up | 4 | | | + | | |
| ZM1s58530935 | 35S-up | 5 | ++ | +++ | | | |
| ZM1s62083330 | 35S-up | 5 | (++) | (++) | | | (++++) |
| ZM4s16359 | 35S-up | 1 | | | (+) | | |
| | 35S-up | 2 | ++ | ++ | | | |
| | 35S-up | 5 | (+) | | | | ++ |
| ZM1s61996727 | 35S-up | 3 | | | ++ | (++) | |
| | 35S-up | 4 | | | ++ | ++ | |
| | 35S-up | 5 | | | (++) | ++ | |

The application's sequence listing, which the Patent Office published only in electronic form, follows.

SEQUENCE LISTING (644 sequences)

SEQ ID NO: 1 - DNA, 584 bp, Oryza sativa
caaataatgattttattttgactgatagtgacctgttcgttgcaacaaattgatgagcaatgcttttttataatgccaactttgtacaaaaaagcaggcttaaacaatgctggagaagctgtgggacgacgtggtggccgggcctcgaccggagaccggcctggagaagctccgcaaggccgctacaacccgcccccttgtcatcaacaaagatggcgacggcgaggcgagcggggcggcgtacaagcggacgcagtcgatgccgacgaccccgacgacgccggtgacgccgtcgtcttcgtctccgacgacgacggcgacgacgacgccgcggggcagcaacgtgtggaggagcgtgttccacccggggagcaacctcgccaccaagagcctcggcgccaacctcttcgaccgcccgcagcccaactcccccaccgtctacgactggctgtacagcgacgagaccaggagcagccatcgctgaacccagctttcttgtacaaagttggcattataagaaagcattgattatcaatttgttgcaacgaacaggtcactatcagtcaaaataaaatcattatttg

SEQ ID NO: 2 - protein, 125 aa, Oryza sativa
MLEKLWDDVVAGPRPETGLEKLRKAATTRPLVINKDGDGEASGAAYKRTQSMPTTPTTPVTPSSSSPTTTATTTPRGSNVWRSVFHPGSNLATKSLGANLFDRPQPNSPTVYDWLYSDETRSSHR

SEQ ID NO: 3 - DNA, 1485 bp, Oryza sativa
caaataatgattttattttgactgatagtgacctgttcgttgcaacaaattgatgagcaatgcttttttataatgccaactttgtacaaaaaagcaggcttaaacaatggagatggagagcccgcggagcccggaggcggagatcgggcacagggtggaggacctgtgggaggtggcggagccgcagctgtcgccgtccgagaagctcaactcctgcttcgaggacatcgccgtcgcctccttcccccgcccccttggctcgcaagtaatcgagataccttcaaatgctagtctggctgatactgttgaaatattatccaaaaacaaaattttgagtgcacccataagaaatgttgatgctccagaagatgctagttggattgacaaatacattggcattgtggaatttgctggtattgctatgtggttgctctatcagtctgaggctgcagctaatggcacggctggttctgccgtagggtcaccagtagccaatctagtatctaggctaggctctttcacattcagaaggacatcatctggcagggtagaaaccaccactgacccagaatcagatgaaaccgcatcggtcggtgggagctttttcgaaacactcacttcctctgaattctacaagaacacaaaggttggcgatatctcaggaagcttccgatgggcgccattcctggcactgcagacatctgacacattcctcaccatgttgctgctgctgtccaagtacaggatgaagagcctcccagtagtagacattgggggagataagattgagaacatcattacgcaatcttccgttgtgcacatgcttgcagagtgtgttggacttccttggtttgagagctggggaactaagaaactctccgagctggggcttcctctcatgaagccatgcaaactcgttaaggtaaatgaagaccaacctgtgttaaaagccttccaactgatgagggaaaaaggcgttggtggcctcccggttatggacacaagtggcacaaaagcaattggcaatatcagcatcagagatgtccaatatcttctaactgcccccaacatatacaaagattacaggacaatcacggccaaggatttccttaccgcggtccggcaacaccttcaggagcaacacgaggcctcgccgttgctcggctccgtcatcacatgcagaagggatgatgaagtcaaggacatcatactgaagctggactcggagaagatccacaggatctacgtgatcgatgacaaggggaacaccgagggggtcatcacgctgagggacataatctccaagctggtgcacgagccacgccattactttggggatttcttcgatggtgttgttcccctgcctccaaacagcactgtatgaacccagctttcttgtacaaagttggcattataagaaagcattgcttatcaatttgttgcaacgaacaggtcactatcagtcaaaataaaatcattatttgc

SEQ ID NO: 4 - protein, 425 aa, Oryza sativa
MEMESPRSPEAEIGHRVEDLWEVAEPQLSPSEKLNSCFEDIAVASFPRPLGSQVIEIPSNASLADTVEILSKNKILSAPIRNVDAPEDASWIDKYIGIVEFAGIAMWLLYQSEAAANGTAGSAVGSPVANLVSRLGSFTFRRTSSGRVETTTDPESDETASVGGSFFETLTSSEFYKNTKVGDISGSFRWAPFLALQTSDTFLTMLLLLSKYRMKSLPVVDIGGDKIENIITQSSVVHMLAECVGLPWFESWGTKKLSELGLPLMKPCKLVKVNEDQPVLKAFQLMREKGVGGLPVMDTSGTKAIGNISIRDVQYLLTAPNIYKDYRTITAKDFLTAVRQHLQEQHEASPLLGSVITCRRDDEVKDIILKLDSEKIHRIYVIDDKGNTEGVITLRDIISKLVHEPRHYFGDFFDGVVPLPPNSTV

SEQ ID NO: 5 - DNA, 564 bp, Oryza sativa
atgtcgtcttccaccgacgcccctgtcagccctcgctcccagttcgcgctggcctgcttcgaggagcttctcgagaccgcggtggtggacgtggcctccgagtgccaccgcatcgcgcgcctgggcctcgaccgcggcgtcgacgccgaggaggaggagctccgcgcctgggccgcccgcgaccacccgggggccgaggagggcggcggcgccgtcggcggtggcggagggaacaagggggtggtcgatgtatttggccaggtgctccccgccgtggccgccgacctcgtcgactgcatgaactgcggacgccccgtcgccgccggccgcttcgcccctcacctcgagaagtgcatgggcaagggacgcaaagctcgcacaaaaacaacaagaagtagtaccgctggacgaactaggaacaacaatggtagcgcggcttcttcatactccccgtattccagcccagctatcgctaacagagcaagccttcctaacggtgtcactgatggcagtgccagtgtcacaggagaggatcacagcaatcacatattgccggagccctga

SEQ ID NO: 6 - protein, 187 aa, Oryza sativa
MSSSTDAPVSPRSQFALACFEELLETAVVDVASECHRIARLGLDRGVDAEEEELRAWAARDHPGAEEGGGAVGGGGGNKGVVDVFGQVLPAVAADLVDCMNCGRPVAAGRFAPHLEKCMGKGRKARTKTTRSSTAGRTRNNNGSAASSYSPYSSPAIANRASLPNGVTDGSASVTGEDHSNHILPEP

SEQ ID NO: 7 - DNA, 953 bp, Oryza sativa
ttattttgactgatagtgacctgttcgttgcaacaaattgatgagcaatgcttttttataatgccaactttgtacaaaaaagcaggcttaaacaatggctgaatgccaacctctgcaactgcaagaaggcaagaaactgcaagagctgcagccatacgatggctgcaatccttcagtgtacagaggcccaattctgctgccccggcaggccaactcggcgccgccggccgtgccgccggagatgtcgtcctcgtcggggtcagggagaagcgcgacggaggcgagagcgttgaagatccacagcgaggctgaacggcggcggcgagagaggatcaatgctcatctgacaacactgaggagaatgatccctgatactaagcagatggacaaggccaccttgttagccagagtggtggaccaagtgaaggatctgaagaggaaagcaagtgagatcacacaaagaacacctctccctccagagaccaacgaagtctccatcgaatgcttcaccggagacgctgccaccgccgccaccactgtcgccggcaaccacaagaccttgtacatcaaggcttccatcagctgcgacgaccggccggacctcatcgccgggatcacccacgcattccatggcctgaggctgaggacggtcagagcagagatgacatcactgggaggaagggtgcagcatgtgttcatattgtgcagggaggaaggcattgcaggtggtgtgagcctcaagtctctgaaggaggctgtcaggcaggcactagccaaggttgcctctcctgaattggtatatggcagcagtcactttcagagcaagaggcagaggatcctggagtcacattgctcaattatgtccatatagacccagctttcttgtacaaagttggcattataagaaagcattgcttatcaatttgttgcaacgaacaggtcactatcagtca

SEQ ID NO: 8 - protein, 258 aa, Oryza sativa
MAECQPLQLQEGKKLQELQPYDGCNPSVYRGPILLPRQANSAPPAVPPEMSSSSGSGRSATEARALKIHSEAERRRRERINAHLTTLRRMIPDTKQMDKATLLARVVDQVKDLKRKASEITQRTPLPPETNEVSIECFTGDAATAATTVAGNHKTLYIKASISCDDRPDLIAGITHAFHGLRLRTVRAEMTSLGGRVQHVFILCREEGIAGGVSLKSLKEAVRQALAKVASPELVYGSSHFQSKRQRILESHCSIMSI

SEQ ID NO: 9 - DNA, 1472 bp, Oryza sativa
tttgtacaaaaaagcaggcttaaacaatggcaacgcccaagctgtcccctgtatcgccggtgcggccggaagataagcagcgcgcgtcctcctcgtcgtcgtcgggggcggtggctgcgcctctgagggtgcaggacgatacggcggtcgaggagtacgagcagtacctgcggcttccggagctcgcaaggctgtggaaggataggtgctgtccggagtgggccgacgagggcctcgtcaagccggcgctgcaggcgctggagatcaccttccgcttcatctccgtcgcgctctccgacccgcggggctacgccaaccgccgcgagctcgcgcggcggctggaggcgctcgcggcaagggaggtggagctggtggccgcgctctgcgagggcgagcagtgcccgccgctggccgagctgagcgcgtccaaaggcgtgctcccgcgggagcggagcgcgtctgaggtgtggaagattcccggtagcgccgccgcggtggtgtgccaggtcagcgaggccagcctgctcccgcggctcgccgcttgggacaagtccgagaccgtggcggccaggatcaagtacgccatcgagagccagatgcagggctgcgtgttcaccctcggcctcggcgagcccaacctcgccggcaagccggtgctcgagtacgaccgcgtcgtgaggccgcacgagctgcacgccctcaaggcgaagatcgcgccggagcccaagaccggctaccgcaacaaggagaacgaggcgctgttcactatccaccagatactcgagtcctggctgtgcgcggcctcacagcttctcactcgcctaaacaaccggatcgaagcaagaaactgggaggccgcggcgagcgactgctggatcctggaacgcgtctggaagctgctcgccgacgtcgaggacctgcacctgctgatggacccggacgacttcctgcggctcaagagccagctcgcaatacgggcggcaccgggctccgacgcgtcctcctgcttccgctccagggcgctgctgcacgtcgctaacgccacgagggacctcaagaagcgtgtgccatgtgtgcttggcgtcgaggtggaccccaacggcgggccgagggtgcaggaggcagccatgaggctgttccacagccggcggcgcggcgagggcgaggatgccggcaaggtggagctgctgcaggcgttccaggccgtggaggcggcggtgaggaggttcttcttcgcgtaccggcagctcgtggcggcggtgatgggcaccgcggagtcgtcgaccaaccgcgcgctgttctcgccggcggaggagatggaccccctggcgcagatgttcctcgagccgccctacttccccagcctcgacgccgccaagacgttcttggccgactactgggtacggcggatggccggtgacggtgactctgcttcgtccaggcgaagctgaacccagctttcttgtacaaag

SEQ ID NO: 10 - protein, 474 aa, Oryza sativa
MATPKLSPVSPVRPEDKQRASSSSSSGAVAAPLRVQDDTAVEEYEQYLRLPELARLWKDRCCPEWADEGLVKPALQALEITFRFISVALSDPRGYANRRELARRLEALAAREVELVAALCEGEQCPPLAELSASKGVLPRERSASEVWKIPGSAAAVVCQVSEASLLPRLAAWDKSETVAARIKYAIESQMQGCVFTLGLGEPNLAGKPVLEYDRVVRPHELHALKAKIAPEPKTGYRNKENEALFTIHQILESWLCAASQLLTRLNNRIEARNWEAAASDCWILERVWKLLADVEDLHLLMDPDDFLRLKSQLAIRAAPGSDASSCFRSRALLHVANATRDLKKRVPCVLGVEVDPNGGPRVQEAAMRLFHSRRRGEGEDAGKVELLQAFQAVEAAVRRFFFAYRQLVAAVMGTAESSTNRALFSPAEEMDPLAQMFLEPPYFPSLDAAKTFLADYWVRRMAGDGDSASSRRS

SEQ ID NO: 11 - DNA, 882 bp, Oryza sativa
atggccgtctacatccgcctcgacgacgccgtccgcgcgcggctccgcggggacgccgggtcgtcggcgagcagcggcagcgagcacgaggcctccgcgtgcctgtccgggctcgtgcaggcgtttcttgagacggagggcgccgcggcgggagaggacggcgccgggccggcgagcaagggcggcgaagggtatgactccgatgatggcgacggtccggaacgcgcggcggcggcggcggagtccgtgagggagctgctcgacccgccggtggaggaggacccgttccgggtcaggctggctgctgccgtggcggccgcgatggaggcggagccggcgctgaggaggtacggggcggcgttccggcgcgccgtggcgcggcggctgcgggccgccgggtacgacgccggcgtgtgcaagtcgcggtgggaggcttccggtggcatcacggccgggacgtacgagtacgtcgacgtggtcgcgccggcggcgagggggcagaagagcaggtacattgtggacgcggacttccgggcggggctggaggtcgcgcgcgcgacggcggagtacgccgtcgtcgtggccgccgtgccggcgtcggtggtggtggcgcgggaggaggccgtcgggcgcgccgtgcgcgtcgcggccgacgcggcgcggcggtcgctccgttcgcacggcctgcacgtcccgccgtggcgcaagacccggtacatgctcgccaagtggctcggcccctacaagaggtcgacggccacctcgccgtcggccgccggagcaatgccgatgcccgccgccgccgccgggatggacgtcaagtgccgcgccgtcgggttcttcacgccgccgccggccgctccggcggcgaggatcaagtag

SEQ ID NO: 12 - protein, 293 aa, Oryza sativa
MAVYIRLDDAVRARLRGDAGSSASSGSEHEASACLSGLVQAFLETEGAAAGEDGAGPASKGGEGYDSDDGDGPERAAAAAESVRELLDPPVEEDPFRVRLAAAVAAAMEAEPALRRYGAAFRRAVARRLRAAGYDAGVCKSRWEASGGITAGTYEYVDVVAPAARGQKSRYIVDADFRAGLEVARATAEYAVVVAAVPASVVVAREEAVGRAVRVAADAARRSLRSHGLHVPPWRKTRYMLAKWLGPYKRSTATSPSAAGAMPMPAAAAGMDVKCRAVGFFTPPPAAPAARIK

SEQ ID NO: 13 - DNA, 1171 bp, Oryza sativa
ttgcaacaaattgatgagcaatgcttttttataatgccaactttgtacaaaaaagcaggcttaaacaatggatcaaattaggcaaagcgtaactctgaagaagaatcaaaagttgcatacagatatcgatatgcactctccagagagtgtgactgacaaacaccaccaattttttttataagatgacaggataaacacttcgacttggaccaccacatcaatgatctatcgatgatgaacacaaagccataagttgtcaacagcacgtacacgcccgatgtctccactctccagccctggatcacagagcgtgctcgaagattcccagattccgaatggaggacggcgggaagcacttcgtgttcgtccatggcctcggccacggcgcgtggtgctggtacagggtggtcgccgcgctgcgcgccgcggggcaccgcgcgacggcgctcgacatggccgcggcgggcgcgcacccggcgcgcgccgacgaggtgggctccctcgaggagtactcgcgcccgctgctcgacgccgtggccgcagcggcgcccggcgagcggctggtgctcgtcgggcacagcctcggcggcctcagcctcgcgctcgccatggagaggttcccggacaaggtcgccgccgccgtgttcctcgccgcctgcatgccggccgccggcaagcacatgggcatcacgctcgaagagttcatgaggaggatcaaaccggatttcttcatggacagcaaaaccatcgtcctgaacacgaatcaagaaccaagaaccgcagttctgcttggccccaaattactggcagagaaactgtataatcgaagcccaccagaggatctgacgctggcgacgatgctggtgaggcctggcaccaactacatcgatgatccgatcatgaaggacgagacgctgctcactgaaggcaactacgggtcggtgaagagggtgttcttggtcgccatggatgatgcttcgagcgacgaggagatgcagcggtgggccattgatctgagcccgggcgtggaagtcgaggagctcgccggagcggatcacatggcaatgtgctccaagccgagggagctgtgtgatttgctgctcaggattgcagctaagtatgactaaacccagctttcttgtacaaagttggcattataagaaagcattgc

SEQ ID NO: 14 - protein, 263 aa, Oryza sativa
MEDGGKHFVFVHGLGHGAWCWYRVVAALRAAGHRATALDMAAAGAHPARADEVGSLEEYSRPLLDAVAAAAPGERLVLVGHSLGGLSLALAMERFPDKVAAAVFLAACMPAAGKHMGITLEEFMRRIKPDFFMDSKTIVLNTNQEPRTAVLLGPKLLAEKLYNRSPPEDLTLATMLVRPGTNYIDDPIMKDETLLTEGNYGSVKRVFLVAMDDASSDEEMQRWAIDLSPGVEVEELAGADHMAMCSKPRELCDLLLRIAAKYD

SEQ ID NO: 15 - DNA, 767 bp, Oryza sativa
tgatagtgacctgttcgttgcaacaaattgatgagcaatgcttttttataatgccaactttgtacaaaaaagcaggcttaaacaatggtggtgctcgtggaagcatcgccgcgcggcggcgccggtgatcatccggcctcctgcgagctcgacgccggcggcgatgtcggcagcggcgggaggcagtacgcggccgtcgtcgtcgggggcaccttcgatcggctgcaccagggacaccacctcttcctcaaggcggcggcggagttcgcgagggagaggatcgtgatcggcatctgcgacggccctatgctcgccaagaaacagtatgcttacctgatacagccaatcgaaaagcgaatggaaaatgttaaggagtatatcaagtccatcaagcctgatcttgaagttcatgtcgagccaatcgtggacccctttggcccctccattgttgacgaagctttagaagcaatcatcgtcagtaaggagactttgccaggagggcttgctgtcaacaggaagagagctgagagaggcctcgtacaacttgagattgaagtggtggaactggtgccggagaagtctacagggaacaagataagctctacagcattcaggaagaaggaagccgagagggaattgcacaagcagcagcaggaggcaccacatgaacaagcagttgaacttgagtgcagaatataaacccagctttcttgtacaaagttggcattataagaaagcattgcttatcaatttgttgcaacgaacag

SEQ ID NO: 16 - protein, 204 aa, Oryza sativa
MVVLVEASPRGGAGDHPASCELDAGGDVGSGGRQYAAVVVGGTFDRLHQGHHLFLKAAAEFARERIVIGICDGPMLAKKQYAYLIQPIEKRMENVKEYIKSIKPDLEVHVEPIVDPFGPSIVDEALEAIIVSKETLPGGLAVNRKRAERGLVQLEIEVVELVPEKSTGNKISSTAFRKKEAERELHKQQQEAPHEQAVELECRI

SEQ ID NO: 17 - DNA, 1732 bp, Oryza sativa
atagtgacctgttcgttgcaacaaattgatgagcaatgcttttttataatgccaactttgtacaaaaaagcaggcttaaacaatggagtcctttacggaatacggggaggcaagccaatatcagattcaagaggtcgttggcaagggaagctatggagtagttgctgctgcagtagatactcacactggggagagagttgcaatcaagaagatcaatgatgtttttgagcatgtttcagatgccatccgcattctgcgggaaatcaaagttcttcggcttctccgccacccagacattgttgtgatcaagcacatcatgctccctcctacccgaagggagttcagggatatttatgttgtttttgaactcatggagtcagatctacatcaagttatcgaagcaaatcatgaccttagcccagagcatcaccgttttttcttgtaccaacctctttgtgctctcaagtacatacattcagctaatgtatttcatcgtgacttaaagccaaagaacatactggccaattcagactgcaaactgaagatttgtgattttggacttgcacgtgtagcatttaatgattcaccttcaacaattttttggaccgattatgtggcaacaaggtggtaccgagctcctgaattatgtggttcttttttctccaaatacacccctgcaattgatatttggagtatagggtgcatttttgctgaaattctcaccggaagaccattatttcctgggaggaatgttgtgcaccagttagatctaataacagatctacttggaactccatcatctgaaactttatcacggattcgtaatgagaatgccaggggatatttaactggcatgcagaggaaacatcctatccccttttctcataagtttcataatgctgatcctctcgctttgcgcctgctagagcgtttacttgcatttgatcctaaagatcgacctactgctgaagaggctttagctgatccatattttagaggaatttctaagttgagccgggagccttcaagactgccagtttcaaaatttgagtttgaatttgagcgaaggaaactgacaaaggatgatgtaagagaaatgatatatcgagagatattagagtaccatccccaaatgcttcaggagtacatcagaggtggagaacaaattagcttcctctatccaagtggggttgatcgtttcaaacggcagtttgctcatcttgaggagaactacagcagaggagaaagaagtacccccttgcggagacaacatgcgtctttgccaagggaaagagtatgctcatcagtagatagcaataatcaagactctgacaatgaagagaggagagcgatatcttctattgcccgaactatgataagtcccccaagatcacaagaaaagggcaagaatcgtgcatctgcttatccaaatggcataatcaatctaaactccaatcctaagatctatttaaagagtgctagtatcggtgcttcaacgtgcatcattagagggaataaaggcccgaaggtatttgcctactgccagtatgatgacagtgcttaaattttagcctgacacttggagaatggtatctctgaggacatggaagaggttgtctatgagttgtcagataatgtgaccaggatgctctcctagacccagctttcttgtacaaagttggcattataagaaagcattgcttatcaatttgttgcaacgaacaggtcacta

SEQ ID NO: 18 - protein, 493 aa, Oryza sativa
MESFTEYGEASQYQIQEVVGKGSYGVVAAAVDTHTGERVAIKKINDVFEHVSDAIRILREIKVLRLLRHPDIVVIKHIMLPPTRREFRDIYVVFELMESDLHQVIEANHDLSPEHHRFFLYQPLCALKYIHSANVFHRDLKPKNILANSDCKLKICDFGLARVAFNDSPSTIFWTDYVATRWYRAPELCGSFFSKYTPAIDIWSIGCIFAEILTGRPLFPGRNVVHQLDLITDLLGTPSSETLSRIRNENARGYLTGMQRKHPIPFSHKFHNADPLALRLLERLLAFDPKDRPTAEEALADPYFRGISKLSREPSRLPVSKFEFEFERRKLTKDDVREMIYREILEYHPQMLQEYIRGGEQISFLYPSGVDRFKRQFAHLEENYSRGERSTPLRRQHASLPRERVCSSVDSNNQDSDNEERRAISSIARTMISPPRSQEKGKNRASAYPNGIINLNSNPKIYLKSASIGASTCIIRGNKGPKVFAYCQYDDSA

SEQ ID NO: 19 - DNA, 1519 bp, Oryza sativa
atttgtcctactcaggagagcgttcaccgacaaacaacagataaaacgaaaggcccagtcttccgactgagcctttcgttttatttgatgcctggcagttccctactctcgcgttaacgctagcatggatgttttcccagtcacgacgttgtaaaacgacggccagtcttaagctcgggccccaaataatgattttattttgactgatagtgacctgttcgttgcaacaaattgatgagcaatgcttttttataatgccaactttgtacaaaaaagcaggcttaaacaatgaacgaaggacttgtactgtcagtaaagctttggctaactacacaattgcagtctggtggaaacttcacgttttctggatcactggaacctttctttggaattggctctgatgtaatttctccccgtaaaattagcacttccctggccgaaaacgttgattttggaagatcatttcccttggtgatggaagaattgtgcagagcgtccggcagcataaagatgttgtcagctgtgtggcagtttcatcagatggaagtgtaattgcaaccggaagttatgacacaactgttatgatctggcatgcattccgaggaaaatcagctgataaaaaatcaagaaatgcaaattatgatctgtctactaaggatcatgttattatcgaaagcccttatcatattttatgtggccatgatgatattatcacatgcttatttgttagtacggaactagatatcgttatcagtggatcaaaagatggaacatgtatatttcatacattgcgtgagggaaaatatgttcgatccattcgacatccatcaggagctggcttgtcgaaactggtagcatcgcagcatggcagactagtattttactccgacagtgacctatccttgcatatgtattccataaatggaaaacatattgcttcttcggaagccaatggccgtctcaattgcatggaactaagttgttgtggtgagtttgtggtatgtgctggtgatcatggacaaattgttcttcgctctatgcattctcttgatgttgtatggaggtatgagggagctgggaagactataacttcactagttgtgactccagaggagtgcttcttggcaggaaccaaggatggcagtttgattgtattttcaatagaaaaccctttaattcgaaaaggcactgttcagcggaacaagataaaatcttctgtgggtggttagacccagctttcttgtacaaagttggcattataagaaagcattgcttatcaatttgttgcaacgaacaggtcactatcagtcaaaataaaatcattatttgccatccagctgatatcccctatagtgagtcgtattacatggtcatagctgtttcctggcagctctggcccgtgtctcaaaatctctgatgttacattgcacaagataaaaatatatcatcatgatcagtcctgctcctcggccacgaagtgcacgcagttgccggccgggtcgcgcagggcgaactcccg

SEQ ID NO: 20 - protein, 338 aa, Oryza sativa
MNEGLVLSVKLWLTTQLQSGGNFTFSGSLEPFFGIGSDVISPRKISTSLAENVDFGRQCLTAVQIHGDNYLILCGNWENSFQIISLGDGRIVQSVRQHKDVVSCVAVSSDGSVIATGSYDTTVMIWHAFRGKSADKKSRNANYDLSTKDHVIIESPYHILCGHDDIITCLFVSTELDIVISGSKDGTCIFHTLREGKYVRSIRHPSGAGLSKLVASQHGRLVFYSDSDLSLHMYSINGKHIASSEANGRLNCMELSCCGEFVVCAGDHGQIVLRSMHSLDVVWRYEGAGKTITSLVVTPEECFLAGTKDGSLIVFSIENPLIRKGTVQRNKIKSSVGG

SEQ ID NO: 21 - DNA, 1998 bp, Oryza sativa
atgaacatcgtgaagggcgtcgccgatctcctccgcaagtcggcggcggcctcgtcgggggttggcggcggcggcggcgggggtggagggggcggcgacggcggcggcggcggcggcgccggcgccggtggctcctcctcctccgctcccgacaggctccccgccgcgccgtcccccagggtccgcttcagtgatagtggtgttgaaggagtcttaaacatgctttggcagaaatatgagaatgccattgacaaggctgaaaagaaggaatccttgcaaatatttatcatgcatttcgtacaagcattcaaagagtgggaaccgcaatacacggagcaatcagttgatcaagaaccaatatcagatgatacggttttaggatgctccagagggcatccttctgagatcatccttattcttgtgcaggaggtttctcaaataacttctttcattactgagagcagcagctgttcggaatcctctcctaacatttcagaacaatcgtcagacctgatgttaagctctgagggattgaatattttggaatgcttgaccattgttactcgctcagtgcataactgtagagtatttagttattatggaggtgtgcagaaggtcactgctcttctgaaagctgcagttgtaaagctcaagactttgaccagtttgcttgccgcagatgaacagctgtcaaacaaagccatagataacatgaagatgatgcaaaagatacttgtacacattgttacaataatttcaaacttcatgaacttggagccaactgctactaggttaacgcaatttgtcaatactactgggaaaaccctatcaaatgagtttttggccacagttactccaatatctgcaaaaagcgctgttcatgataccaactggcagcaaaaggccattgttgcagttatggaagctggaggcgtcaattggttagtagaactcttaagggtcatccgaagattgaatttgaaagagcagtggactgacgtgctacttcactttataactttgcatgctctgagatcaacaatctctcaacatgcacgtgcacagaatcatttcagaagcattggaggactggaggttctattagatggactgggattaccatcaagcaaattgtcagtctcaaagtattcttttgtccccagtgatgaaaggagtggaattctacagctccagatattatcgctggaaattctgagggaggcagtttttggtaatgtcaacaatttacagttcttatgtgaaaatggacggatacataagtttgcaaacagcatctgttggcctgcatttatgcttcaggggtttcatcaacaaaaggcacttgactctcgagtgcagaactgtaagcttgaagaaagcactgggatatcgcttacatcagaatcttttgcaagtcctattgatattcttgatacaactgaatggactgagtattctgtaaagctgagcatagcactttgttcttttcttcttcctcctaacgagataaggaactcttctggtgcagttgatagccaagtttctctgtccatctcagtggcatactgtgagcaatgtgcaagatggattataaaggttctttcaacagtttttccatgcatcaaagcttgtgctagtgaatctgaattgcccaaccatataaggattttggcaaataccctacagcattatattctttgcacattcaggaaggttctcatttcagtaccagctctgctcaaatcttttcgcgctgagggtttatggagtctgatattttcagataaatttttttactttggatcatctatggagtatattcatcatattgtttgtgacacacaaaacaatcattttattgatgctactgaatcagctggttctaaaggccttaatcaagctgatgtcaacattcttcaagcagaagctatttccttcttggagtttgccgcaacaataaatgagaacacaaacaatctgagtgctcagcgttattag

SEQ ID NO: 22 - protein, 665 aa, Oryza sativa
MNIVKGVADLLRKSAAASSGVGGGGGGGGGGGDGGGGGGAGAGGSSSSAPDRLPAAPSPRVRFSDSGVEGVLNMLWQKYENAIDKAEKKESLQIFIMHFVQAFKEWEPQYTEQSVDQEPISDDTVLGCSRGHPSEIILILVQEVSQITSFITESSSCSESSPNISEQSSDLMLSSEGLNILECLTIVTRSVHNCRVFSYYGGVQKVTALLKAAVVKLKTLTSLLAADEQLSNKAIDNMKMMQKILVHIVTIISNFMNLEPTATRLTQFVNTTGKTLSNEFLATVTPISAKSAVHDTNWQQKAIVAVMEAGGVNWLVELLRVIRRLNLKEQWTDVLLHFITLHALRSTISQHARAQNHFRSIGGLEVLLDGLGLPSSKLSVSKYSFVPSDERSGILQLQILSLEILREAVFGNVNNLQFLCENGRIHKFANSICWPAFMLQGFHQQKALDSRVQNCKLEESTGISLTSESFASPIDILDTTEWTEYSVKLSIALCSFLLPPNEIRNSSGAVDSQVSLSISVAYCEQCARWIIKVLSTVFPCIKACASESELPNHIRILANTLQHYILCTFRKVLISVPALLKSFRAEGLWSLIFSDKFFYFGSSMEYIHHIVCDTQNNHFIDATESAGSKGLNQADVNILQAEAISFLEFAATINENTNNLSAQRY

SEQ ID NO: 23 - DNA, 658 bp, Oryza sativa
actgatagtgacctgttcgttgcaacaaattgatgagcaatgcttttttataatgccaactttgtacaaaaaagcaggcttaaacaatggagccagccgccgccgccgccgccgtcacggccgccgtcgacctgtccacggcggccgccgacctcggcagggtgcacctcctcccctgcggcatcaagcagaacggcgccgccgccgtctccgactacttcaagcccaaggacacaggtgtggaggtggaggggattagggtggaggaggccttcttccgcgggaggaagctgcagggcgccaccatctcgctcccggatggctaccgaggttatgtattggagaagaggagtggaggaaaggatatgaagaagctggagggggaggttagcaatttcaaatcccgtgcggagtttcaaaacataacatattggaatcatgataccacaccatcggcagaggatcccctaccgcggtgctttcatttgctaaccgttgctaatgctatgcacaagccagtgaccgctgaagagatggcttacatgtccgcaatgcagaatcagagcagttaaacccagctttcttgtacaaagttggcattataagaaagcattgcttatcaatttgttgcaacgaacaggtcactatcagtcaaaat

SEQ ID NO: 24 - protein, 161 aa, Oryza sativa
MEPAAAAAAVTAAVDLSTAAADLGRVHLLPCGIKQNGAAAVSDYFKPKDTGVEVEGIRVEEAFFRGRKLQGATISLPDGYRGYVLEKRSGGKDMKKLEGEVSNFKSRAEFQNITYWNHDTTPSAEDPLPRCFHLLTVANAMHKPVTAEEMAYMSAMQNQSS

SEQ ID NO: 25 - DNA, 417 bp, Oryza sativa
atgtcgcagctgccgccgccgatggccgccgccgccgctgcggtgggcgtcgccgacggggggaggacgaagaagcgggcggggctcccgaggctgctgcacaagttcttcttcaaggtgctgcggctgaggccggcggcggcggcggcggagcccggcgccgccgcgttcgaggcctactacggctaccggatggtggacgagtactactactacagctacggcggcgccgccgggccggcgtcttgggcgggcgtgctctcctccatcccggaggaggagagctccgacgagggcacgccggccgccgacgccgccacgctccgcaaggcgcgctccgactccgaccagttcgtcgccgccgaggccgccgccgtcgccgtagtagtagtaaattaccgcggcgcagctagctga

SEQ ID NO: 26 - protein, 138 aa, Oryza sativa
MSQLPPPMAAAAAAVGVADGGRTKKRAGLPRLLHKFFFKVLRLRPAAAAAEPGAAAFEAYYGYRMVDEYYYYSYGGAAGPASWAGVLSSIPEEESSDEGTPAADAATLRKARSDSDQFVAAEAAAVAVVVVNYRGAAS

SEQ ID NO: 27 - DNA, 1321 bp, Oryza sativa
tttgtacaaaaaagcaggcttaaacaatggccttcttccctaacattcccgaggcaaagcaggagattcagtccttgtacagaaattatgcacatttgtttgacatgtcatcggataatgccggtgtagactcccgcataatgcggcgccagcctgccatgttgatagatcgttctgttttcctcactggaagcgcgatttggactattgccctccactacaaggctcacatttacagatggttactgcagaagttttctgccatccagggcgcaccaatttattgtgccatgatattgcgatccttatgtcgacgtagctccttgcctttctttgttggcattagtgttctgacagccaggatatataactacgttacgattcacaatcatatttattccccacaactctgcgctggccatgacgctaaccttcggagggatttgttcattcaagacactgaattgtgcaataagcaaaccctcgattcaggtttccttggcagcaagcatgattgtatccgtctagcacttcattttatttgcagcactgccaatttaaaggtttatacaacaccaaaacagatcggtttcgatgggaagtgcaaacaaaagaataccgagagaggccgattttggaggatcttatcaacaaatgagcaatatctgacttatattggggcactagtgacactacaactgtttttacaactgagcagagcgaacattaccactctgctcctgccaatgctatatcagacaacaagctcccagcgcaatgctgcagttgtcggtaacatcgtgattgttttggtgaactcctttggcattcttgggtctgacttcacaacaaagcaccacggacgggaggtcacattcaccgtgagcgccattctgatggtgttttgccaggtaactaactgaccaggaaaaaaatctccaatattttctcatcagttctatgtttctgtgcgtactaaacataaaaaaattgctgttcatggttgaaattataatttgcaagatcacaatcccattgcttgtggaagcgcaaatcgggctgggcggtggaactcggatactgacgggctacaccacggcgacattcctgctcacatgcgtcgtctcctatggtctcagctggtcatggggctcattgttctgcactattcctggtatgaagattcagtcagctgggcaggttatcggcatgggtctctgtttcgggctctgcttcgtgcaaatgcagtacttcctgctgatgctgtgccggctgaagaacgccatccttgcatactacgcaatgtggatttggtcttgaa

SEQ ID NO: 28 - protein, 298 aa, Oryza sativa
MAFFPNIPEAKQEIQSLYRNYAHLFDMSSDNAGVDSRIMRRQPAMLIDRSVFLTGSAIWTIALHYKAHIYRWLLQKFSAIQGAPIYCAMILRSLCRRSSLPFFVGISVLTARIYNYVTIHNHIYSPQLCAGHDANLRRDLFIQDTELCNKQTLDSGFLGSKHDCIRLALHFICSTANLKVYTTPKQIGFDGKCKQKNTERGRFWRILSTNEQYLTYIGALVTLQLFLQLSRANITTLLLPMLYQTTSSQRNAAVVGNIVIVLVNSFGILGSDFTTKHHGREVTFTVSAILMVFCQVTN

SEQ ID NO: 29 - DNA, 2379 bp, Oryza sativa
atggcggagtcgctgggactgggagcgctctgccgcggcgggggatggtgctacgccgcgatctggcgctccgaccgtcgcgacccacggttgcttacgatcggtgagttccacagtgaagatggtaccagaaatgttgttgagaagatgcttaatcaggtccatgttgttggagaaggcatcatagggagagctctagtaagtggagagtgccaatggatttctgatacctcctttagttttgcccagacaagtgatgcagataaccaagacttatttcagggctatacttggtggcagcatcagttcctgtgtggaataaagactattgcagtaatacctattgcagatcttggtgtcgcacagtttggttccatgcaaaagatttctgagtgcttggagtttctggatcaagttaagggcatattttgtcagagggaaatcgttccgtgggatctttctgctgaagaaattcaaagaaatgttctcccatatcatcagcaatttcaactcagttctctaagtagtgcagatggtcttacaaatatcaagactgacccagaaaacaagaaacttctggagaactcagcaagtgtagagtctctacgtagtttagcaagtttttcaagcaaatactctcagagttcttcaaacggtttcacctcctatgaaagctgcaacagtatgaatcctcatatagtggccatgccagtgaactccaaatcaataaatacggtgagagcatttaatagtaccggaaaattgctgcagcacaatattggttcagaaaacccactacagattaaattctgtcaacatcctgattctaatctggcaagtgcaacagacgtttttttaagtttgaacaatcttccgagaatagagaacgagatatcatgcccacctaacaagctaggatattgcatacaaagtgagaagccatatagttttcagagttcattctcatcttgtttttctgtgggtgatgagctgaagccaattttatttgacagtgccacttcttttgttcagaatgacttaatgcaagagttcaatctcactggatttacttctcaggctgattctgcggttcatgagttacccaaacaaattctaggggaaacagctactggagcattatattctgacagaaaaagtaacaatggaagttctgatttgctggatggtacaatatttgatccctttgtgcaagaatggtgcgataacaatgccttactagaaggaaacactccccattttggtgccactaccgccgattctgttacagaacatgcaagcagttatccattgtcagttgaagagaggagcttgttttcagaatctgtctttgaggaactacttggtgttagtggcaatgtgaatacggatgcaccgggtgattcagctgtggtgatggctggtgatccattagtcggccttgtctcaggctgtcaattgccaacgtacactcttcaggactctctttcagtgtgcaagccacaacaagaaccatcactggatttcccttccggtagcgatacgtctgaacatgtgccaaatggatcatcaaagatgatcccactgtccctaggggcgttgtccatggacgattgttgcagtttgaacacggcacattccaaggtcagccaggttaaaaggcctgaggaagtgaaggtagtgaagaaaagagccagaccgggtgagagcacacggccaagaccaaaggaccggcagcagatacaggatcgtgtcaaggaactacgtgagatagtcccaaacagtgctaagtgtagcattgacgctttgttggaccgaacaatcaaacatatgctctttctgcaaagcgtaacaaagtatgccgagaaaattaagcaagctgatgaacctaagatgatcagcaacaaggatagtggcgctgtcctgaaagagaactcaagtggtgttgtcttgaaagataactctagtgctggaagcaataatggtggtgccacttgggcctatgaggttgcaggacggaccatggtttgcccaataatcatcgaggatctttcaccacctggtcagatgcttgtggagatgctttgtgaggaacgcggatttttcctggagatagcagacacaattcggggatttggactgacaatcttgaagggcctgatggagctccgtgatggcaagatcatggctcgatttctcgtcgaggcaaacaagaatgttactaggatggacatattcttgtcactcgttcagttacttcagcaaaatagcctcaaccgatcctctgaccagatatcaaaggtcattaggaatggggttccatcgtttgcagagcatcagcaatctccaatatcagtgccggttggccttgcagatagatga

SEQ ID NO: 30 - protein, 792 aa, Oryza sativa
MAESLGLGALCRGGGWCYAAIWRSDRRDPRLLTIGEFHSEDGTRNVVEKMLNQVHVVGEGIIGRALVSGECQWISDTSFSFAQTSDADNQDLFQGYTWWQHQFLCGIKTIAVIPIADLGVAQFGSMQKISECLEFLDQVKGIFCQREIVPWDLSAEEIQRNVLPYHQQFQLSSLSSADGLTNIKTDPENKKLLENSASVESLRSLASFSSKYSQSSSNGFTSYESCNSMNPHIVAMPVNSKSINTVRAFNSTGKLLQHNIGSENPLQIKFCQHPDSNLASATDVFLSLNNLPRIENEISCPPNKLGYCIQSEKPYSFQSSFSSCFSVGDELKPILFDSATSFVQNDLMQEFNLTGFTSQADSAVHELPKQILGETATGALYSDRKSNNGSSDLLDGTIFDPFVQEWCDNNALLEGNTPHFGATTADSVTEHASSYPLSVEERSLFSESVFEELLGVSGNVNTDAPGDSAVVMAGDPLVGLVSGCQLPTYTLQDSLSVCKPQQEPSLDFPSGSDTSEHVPNGSSKMIPLSLGALSMDDCCSLNTAHSKVSQVKRPEEVKVVKKRARPGESTRPRPKDRQQIQDRVKELREIVPNSAKCSIDALLDRTIKHMLFLQSVTKYAEKIKQADEPKMISNKDSGAVLKENSSGVVLKDNSSAGSNNGGATWAYEVAGRTMVCPIIIEDLSPPGQMLVEMLCEERGFFLEIADTIRGFGLTILKGLMELRDGKIMARFLVEANKNVTRMDIFLSLVQLLQQNSLNRSSDQISKVIRNGVPSFAEHQQSPISVPVGLADR

SEQ ID NO: 31 - DNA, 1872 bp, Oryza sativa
gtacaaaaaagcaggcttaaacaatgtcagagagcaatgtcgacggcatcgaaatatcagctagtaacgatgagaggagggacagaggggacgctgagatttcggaggatgagccaaggcagacgaggatacggtcgttgaagaagaaggcgctgcatgcatctacgaggctgacgcattcgctgaagaagagagggaagaggaaagtgggctgcagagtgccgaagatcacgatagaggatgtcagggacgcggaggaggagcaggctgtcagctcttttcgagaggttttgtttgccagggacatgctgcctgagaggcatgacgattatcacacgatgcttagattcttgaaagctaggaaatttgatgttgaaaaggcagcacatatgtgggctgacatgctgcactggaggaaggatttcgggactgacacaattttggaagattttgaatttcatgagctagaggaggtgctgcagtattatccccatggttatcatggtgttgacaaggaaggaaggcccgtctatatcgagttgcttgggaaagttgaacccagtaagcttgtacaaattacaacagtggaacgctatattaaatatcatgtacaggaatttgagagagcattccgagagaagtttcctgcatgctcaattgctgctaaaaagcatattgatacgacaactacaatactggatgtccacggtgtgggttggaagaactttagcaagatcgcaagggatttggtgcgctgtatgcagaaaatagatggtgattattatcctgagacactacatcaaatgttcattgtaaatgcggggcctggttttaaactgatctggagtactgtgaagggacttcttgaccccaaaacctcgtctaaaatccatgttctaggaacaaaataccaacacagacttcttgaagctattgactcaagccaactaccagagtttcttggtggttcttgcacgtgctctagccagggaggatgcctgcgatccaacaaaggcccctggagtgatcctttaattatgaagcttgtacattgcatggaatcatctgcgttgaaggacattggccaagtatctgatatagaagaagcaattacaggctctgtaagattgcgtgctctcaagttaccagaaagaattagttatacatcaaatgctgaatctggttcagatgttgatgatcttggatctcctataggacaggaagattttgagtatcatagtttggctccagttcatgaggaggccagggagtcaggatcaacatgcagtggttctgatgataaagttgttgagacgaatacaagatacaaccctcctggaaatggatcgggacagtacagcgcaagacaaaatccctcaataaacagagtttcgcctgagccagcaggtcacgtcccaaatgatggtgaaggaaatgcagatcatgggatcttgaaatatatttctaaaaaagttctcggtgtaattcttgaagtactctcttttttgcgtattttcatccgtcatcgacaacagttggaaaatgtcccccagcatactacaacagtgcacagtaatcaggcagatcttcagataattaaggaagatcgtgtaaatccttgtctagagcgtcttgaaagacttgagacaatgtttaatcagctcagcagaaagcctccagagattccacaggataaggatcgtgctatacaggattcttttgacaggataaagtgcattgaatttgatctggagaagacaaagaaggtattgcatgcaacagtgattagacaaatgcagatggctgagacattggaagctgtaaaggagtccgatcttaggagaagaaaattttgtacataaacccagcttt

SEQ ID NO: 32 - protein, 612 aa, Oryza sativa
MSESNVDGIEISASNDERRDRGDAEISEDEPRQTRIRSLKKKALHASTRLTHSLKKRGKRKVGCRVPKITIEDVRDAEEEQAVSSFREVLFARDMLPERHDDYHTMLRFLKARKFDVEKAAHMWADMLHWRKDFGTDTILEDFEFHELEEVLQYYPHGYHGVDKEGRPVYIELLGKVEPSKLVQITTVERYIKYHVQEFERAFREKFPACSIAAKKHIDTTTTILDVHGVGWKNFSKIARDLVRCMQKIDGDYYPETLHQMFIVNAGPGFKLIWSTVKGLLDPKTSSKIHVLGTKYQHRLLEAIDSSQLPEFLGGSCTCSSQGGCLRSNKGPWSDPLIMKLVHCMESSALKDIGQVSDIEEAITGSVRLRALKLPERISYTSNAESGSDVDDLGSPIGQEDFEYHSLAPVHEEARESGSTCSGSDDKVVETNTRYNPPGNGSGQYSARQNPSINRVSPEPAGHVPNDGEGNADHGILKYISKKVLGVILEVLSFLRIFIRHRQQLENVPQHTTTVHSNQADLQIIKEDRVNPCLERLERLETMFNQLSRKPPEIPQDKDRAIQDSFDRIKCIEFDLEKTKKVLHATVIRQMQMAETLEAVKESDLRRRKFCT

SEQ ID NO: 33 - DNA, 2368 bp, Oryza sativa
ccgggccgttgcttcacaacgttcaaatccgctcccggcggatttgtcctactcaggagagcgttcaccgacaaacaacagataaaacgaaaggcccagtcttccgactgagcctttcgttttatttgatgcctggcagttccctactctcgcgttaacgctagcatggatgttttcccagtcacgacgttgtaaaacgacggccagtcttaagctcgggccccaaataatgattttattttgactgatagtgacctgttcgttgcaacaaattgatgagcaatgcttttttataatgccaactttgtacaaaaaagcaggcttaaacaatggacgtgaagcgggcccggagcccgcgggctccgggcgtcgacgccgacgacgacaagaagcgggccgccgagtggcgcggcgccgtccggccgcacatggtgctggtcggcttcctcatcaccctgcccgtcctggtcttcgtcttcggcggccgctggggctccttccaaaccacctccgcccccaacgtcggcggccgccacgtcgtccccggcggcgtaacaacgacacaaaaaaatgaagccccgaaaaacgtctctgtaccagccactgcaaccaaatctctgccccaaccccaggacaagcttctcggaggactactctctgccgcattcgaagaatcctcatgtcagagcagatacaaatcatctctctaccggaagaagtctccgttccctctgtccccttacctggttcagaagctgcggaagtacgaggcctaccacaagaagtgcggccctggcacgaagcgctaccggaaggcgatcgagcagctcaaggcggggcgcaacgccgacaacgccgagtgcaagtacgtggtgtggttcccctgcaacggcctcggcaaccgcatgctcaccatcgcctccaccttcctgtacgcgctcatctccaaccgcgtcctcctcatgcacgtcgcggcggagcaggagggcctcttctgcgagccgttcccggggagctcgtgggtgctcccgggcgacttcccccacaacaacccgcagggcctgcacatcggcgcgccggagagctacgtcaacatgctcaagaacaacgtcgtccgcaacgacgaccccggcagcgtgtcggcgtcgtcgctgccgccgtacgtgtacctccacgtcgagcagttccggctgaagctgtccgacaacatcttctgcgacgaggaccagttgattctcaacaagttcaactggatgatactcaaatctgacagctacttcgcgccggcgctgttcatgacgccgatgtacgagaaggagctggaaaagatgttcccgcagaaggagtcagtgttccatcatcttgggaggtacctgttccatccgacgaacaaagtatggggaatcgtgagcaggtactacgaagcgtaccttgccagagtcgacgagaaaatcgggttccagatacggatcttcccggagaagccgataaaattcgagaacatgtatgatcagctgacgaggtgcatcagggagcagcggttgttgccggagctcggcacggcggagccggcgaacacgactgccgaagcagggaaggtgaaggccgtactgatcgcttctctgtactcgggatattacgagaagatccgtgggatgtactacgagaatccaaccaagactggcgagatcgtcgcggtgtaccagccgagccacgaggagcagcagcagtacacgtccaacgagcacaaccagaaggcgctggccgagatctatctgctcagctactgcgacaagatcgccatgagcgcctggtcgacgttcgggtacgtggcctacagcttcgccggcgtcaagccgtggattctgctccggccggactgggacaaggagaggtcggaggtggcgtgcgtcaggtcgacgtcggtggagccgtgcctccactcgccgccgatcctctcgtgcagggccaagaaggaggtcgacgcggccaccgtcaagccgtacgttcggcactgcgaggatgtcgggttcggtctcaagttgttcgatagctaaacccagctttcttgtacaaagttggcattataagaaagcattgcttatcaatttgttgcaacgaacaggtcactatcagtcaaaataaaatcattatttgccatccagctgatatcccctatagtgagtcgtattacatggtcatagctgtttcctggcagctctggcccgtgtctcaaaatctctgatgttacattgcacaagataaaaatatatcatcatgatcagtcctgctcctcggccacgaagtgcacgcagttgccggccgggtcgcgcagggcgaactcccgccccccacggctgctcgccga

SEQ ID NO: 34 - protein, 575 aa, Oryza sativa
MDVKRARSPRAPGVDADDDKKRAAEWRGAVRPHMVLVGFLITLPVLVFVFGGRWGSFQTTSAPNVGGRHVVPGGVTTTQKNEAPKNVSVPATATKSLPQPQDKLLGGLLSAAFEESSCQSRYKSSLYRKKSPFPLSPYLVQKLRKYEAYHKKCGPGTKRYRKAIEQLKAGRNADNAECKYVVWFPCNGLGNRMLTIASTFLYALISNRVLLMHVAAEQEGLFCEPFPGSSWVLPGDFPHNNPQGLHIGAPESYVNMLKNNVVRNDDPGSVSASSLPPYVYLHVEQFRLKLSDNIFCDEDQLILNKFNWMILKSDSYFAPALFMTPMYEKELEKMFPQKESVFHHLGRYLFHPTNKVWGIVSRYYEAYLARVDEKIGFQIRIFPEKPIKFENMYDQLTRCIREQRLLPELGTAEPANTTAEAGKVKAVLIASLYSGYYEKIRGMYYENPTKTGEIVAVYQPSHEEQQQYTSNEHNQKALAEIYLLSYCDKIAMSAWSTFGYVAYSFAGVKPWILLRPDWDKERSEVACVRSTSVEPCLHSPPILSCRAKKEVDAATVKPYVRHCEDVGFGLKLFDS

SEQ ID NO: 35 - DNA, 749 bp, Oryza sativa
tattttgactgatagtgacctgttcgttgcaacaaattgatgagcaatgcttttttataatgccaactttgtacaaaaaagcaggcttaaacaatgagcgcgtctcggttcatcaagtgcgtcaccgtgggggacggcgccgtgggcaagacctgcatgctcatctcctacacctccaacaccttccccacggactatgttccaactgtttttgataacttcagtgcaaatgttgtggtcgatgggagcactgtgaacttggggttgtgggatacagcaggacaagaggactacaataggctacgcccgttgagctatcgtggcgctgatgttttcctgctggccttttctctgatcagcaaagcaagctatgagaatgtttctaaaaagtggatacctgaattaaggcattatgctcctggtgtgccaataattctcgttggaacaaagcttgatctgcgggatgataagcaatttttcgtagatcaccctggtgctgtacctatttccactgctcagggcgaagagctgaggaaactcattggtgcagcggcatacattgaatgcagttcaaaaacacagcaaaacatcaaggcagttttcgatgctgcgattaaggtggttctccagcctccaaagcaaaagaagaagaagaaaaaggcgcagaaaggatgtgccatcttgtaaacccagctttcttgtacaaagttggcattataagaaagcattgcttatcaatttgttgcaac

SEQ ID NO: 36 - protein, 197 aa, Oryza sativa
MSASRFIKCVTVGDGAVGKTCMLISYTSNTFPTDYVPTVFDNFSANVVVDGSTVNLGLWDTAGQEDYNRLRPLSYRGADVFLLAFSLISKASYENVSKKWIPELRHYAPGVPIILVGTKLDLRDDKQFFVDHPGAVPISTAQGEELRKLIGAAAYIECSSKTQQNIKAVFDAAIKVVLQPPKQKKKKKKAQKGCAIL

SEQ ID NO: 37 - DNA, 1865 bp, Oryza sativa
gatagtgacctgttcgttgcaacaaattgatgagcaatgcttttttataatgccaactttgtacaaaaaagcaggcttaaacaatggatgaagaggcgcgcgccgccggatgctccccagcgccgccccgcgcgccggctgcttcctgtggcgctgccgccgagctctgcctctgctcccctacaggtgtggagggtatcgagcaggtgcctggatgtccgtgttttgaggacgccggcgctgtcgtggtgagtggagaggcgccggaaggaccgggggttttgtgctctgaggatggcgctgagctcaaattggctgagcagggtgccctggatgtgagattaggttctccggcagtcggaatccatgagcagcagctgttgcatcgtggtacttcaggttccgatgaagctggtgcaatcaatgagatttcacccgttgaggtgtcgccgtcagaggctagttcaaatttggatactgctggggctattggtggctcccctctcatgttggagtccctgccagagaccagtgatacccgaggatgtgaacaagaggttatgcccggtgttgttgtagggtcatctaatagggatgcaagttctgaggtcggtgtcgagtcggagcgtggctcggatgcggacggtcgaaacggccttggtgaaggggaattggtgtcgagcgttgatggaggcggcgccgagaagagctcaaaggtgactggcgtcttgtctgaagaaggtgtggacgggatggaaacagccctggagccgtgtgtggcgtctgttggctccatcacgcaggttgaggaaggtgtggacaggatggagacgagtttggatgactctgaggcttcagacggctcaaccacgcaggattttgatactgacgtggagacggagtcgagcggttcaagtatagaagaacaagacatgggatacggagtgcacatcccacacacggaacaagcgatctgtgaagtggccaggggaaacaagagttcagaggtgaagagctctgacaggatgtcttcagtaaccctaccaacacttatattggcttcaggtgcagcaatgctacctcatccttcaaaggtgctgacaggtggtgaagatgcttattttataacttgtgacggttggtttggtgtagcagatggagtaggtcaatggtcatttgaaggaatcaatgcagggctgtatgccagagaattaatggatggttgtaagaaagctgttatggagagtcaaggagctccagagatgagaactgaggaagttcttgctaaggctgcagatgaagcacgatcccctggttcttccactgttttggttgctcactttgatggtcaagtacttcatgcatgtaatataggtgattctggattcttggtgataagaaacggagaaatatatcaaaaatcaaagccaatgacttacggcttcaattttcccttgcaaattgagaagggggatgatcctttcaaacttgtacagaaatacacaattgatctacaagaaggagatgccattgtgacagcaacagatggcctttttgacaatgtctatgaggaagaaatagcagctgtcatctccaaatcattggaagccggcctcaagccttcggagattgcggagttcctggttgctagggcgaaggaagtgggcagatcggcaacctgtagaagccccttctctgacgcggctcttgcagttgggtatctgggttactctgggggcaagctggatgatgtaacagttgttgtatccgttgttcggaaatctgaagtttaaacccagctttcttgtacaaagttggcattataagaaagcattgcttatcaatttgttgcaacgaacaggtca

SEQ ID NO: 38 - protein, 569 aa, Oryza sativa
MDEEARAAGCSPAPPRAPAASCGAAAELCLCSPTGVEGIEQVPGCPCFEDAGAVVVSGEAPEGPGVLCSEDGAELKLAEQGALDVRLGSPAVGIHEQQLLHRGTSGSDEAGAINEISPVEVSPSEASSNLDTAGAIGGSPLMLESLPETSDTRGCEQEVMPGVVVGSSNRDASSEVGVESERGSDADGRNGLGEGELVSSVDGGGAEKSSKVTGVLSEEGVDGMETALEPCVASVGSITQVEEGVDRMETSLDDSEASDGSTTQDFDTDVETESSGSSIEEQDMGYGVHIPHTEQAICEVARGNKSSEVKSSDRMSSVTLPTLILASGAAMLPHPSKVLTGGEDAYFITCDGWFGVADGVGQWSFEGINAGLYARELMDGCKKAVMESQGAPEMRTEEVLAKAADEARSPGSSTVLVAHFDGQVLHACNIGDSGFLVIRNGEIYQKSKPMTYGFNFPLQIEKGDDPFKLVQKYTIDLQEGDAIVTATDGLFDNVYEEEIAAVISKSLEAGLKPSEIAEFLVARAKEVGRSATCRSPFSDAALAVGYLGYSGGKLDDVTVVVSVVRKSEV

SEQ ID NO: 39 - DNA, 870 bp, Oryza sativa
gacctgttcgttgcaacaaattgatgagcaatgcttttttataatgccaactttgtacaaaaaagcaggcttaaacaatgagccgtgaggaggatgagaagctgctgttcccttcgttcgccttcccggcggagtgcttcccggaagccgccacctccggtggcgagcagaagaaggctcggcagcggcggaggaggaaggtgaagccggaagcggcggcagcgttggctggagagagcggaggggatgagcaggcgaagaagcggcggctgagcgacgagcaggcgcggtttctggagatgagcttcaagaaggagcggaagctggagacgccgcgcaaggtgcagctcgccgcggagctgggcctcgacgccaagcaggtcgccgtctggttccagaaccgccgcgcccgccacaagagcaagctcatggaggaggagttcgccaagctccgctccgcccacgacgccgtcgtcctccagaactgccacctcgagaccgagttgctgaagctgaaggagaggctggcggatgtagaggaggagaaggcgaagctagcagctgtcgccgcggcgacgaccggcggcggtggtggcggcggcggcggcagcagcagcccgacctcgtcgtcgttctccacggtgacgtaccacccggcgctggcggggcagttcggcgtggaggcggcggccgaggaggccgacctcacctacatgagtgagtacgcgtacaacagctacatgctggagttggcggcggccggctactgcggcggggtctacgaccaattcagctgaacccagctttcttgtacaaagttggcattataagaaagcattgcttatcaatttgttgcaacgaacaggtcac

SEQ ID NO: 40 - protein, 239 aa, Oryza sativa
MSREEDEKLLFPSFAFPAECFPEAATSGGEQKKARQRRRRKVKPEAAAALAGESGGDEQAKKRRLSDEQARFLEMSFKKERKLETPRKVQLAAELGLDAKQVAVWFQNRRARHKSKLMEEEFAKLRSAHDAVVLQNCHLETELLKLKERLADVEEEKAKLAAVAAATTGGGGGGGGGSSSPTSSSFSTVTYHPALAGQFGVEAAAEEADLTYMSEYAYNSYMLELAAAGYCGGVYDQFS

SEQ ID NO: 41 - DNA, 1011 bp, Oryza sativa
atgccaccggccgacgccgagccctgcgtcaaggacatccgcgagatcgcgctgcccgtcgcaccgcagtcgccgccgccacccgccgagcacagcgacgtcgacgacgaccattccaacagccccaacctctctgacgtggagatgctgaggatgaagatggagggcatgtcgaaggggatgcgggagaggatggcggagtacagccgccggctggaagccgtcgccggcggcgacaacaacaacgccgccgacgattgccagtccaggaaatgcggcagccgtcacagccgaaagccgagcgcgagcagccagaggagctggagcggcggcagcaccaatgccggcgcgtcccgcgacaccgccgcctcgcacggtcgcagccgccacaccgtggcgccggagaagcatcatcaccatcaccagcagcacaagattatgtctgaagagtgcaaaatggtgggttcaggaagctgctgtgactgcagggaaatcgtggggaagataatggagcaagtaagaacagaatcagagcaatggactgagatgcaagacatgttggagcaggtcaggttagagatgcaagagctgcagtcttccagagatacatggcagcgtcgtgctattgcctctgacatcagtctacgctccctaaattctcaagtgctggagtggaaacatcgcgcgcaggtttccgaacagcacgtggaagatctgcagaagaagatctcggagctggagagcaagctgcacacattcaaggcccatttccccagcccaggtcagcctaaccaagagtggtccgaagcatgcaagatggagaagccgatcagaagcaacaaggctcagcacccgccccggccgtcgcacgagcccggcggcggcagggagaaagagaagcacgtcctcatctgccgcgtgaagcactcgcccagcgtggccgcgaagcgccagccgttccaggagatcggcaacatcagcttgccacggcacgcgccgatgaagcgctga

SEQ ID NO: 42 - protein, 336 aa, Oryza sativa
MPPADAEPCVKDIREIALPVAPQSPPPPAEHSDVDDDHSNSPNLSDVEMLRMKMEGMSKGMRERMAEYSRRLEAVAGGDNNNAADDCQSRKCGSRHSRKPSASSQRSWSGGSTNAGASRDTAASHGRSRHTVAPEKHHHHHQQHKIMSEECKMVGSGSCCDCREIVGKIMEQVRTESEQWTEMQDMLEQVRLEMQELQSSRDTWQRRAIASDISLRSLNSQVLEWKHRAQVSEQHVEDLQKKISELESKLHTFKAHFPSPGQPNQEWSEACKMEKPIRSNKAQHPPRPSHEPGGGREKEKHVLICRVKHSPSVAAKRQPFQEIGNISLPRHAPMKR

SEQ ID NO: 43 - DNA, 320 bp, Oryza sativa
gacctgttcgttgcaacaaattgatgagcaatgcttttttataatgccaactttgtacaaaaaagcaggcttaaacaatggcgtcggcgacgttcctggaggtgctcctagccatcttcctgccgccggtcggcgtcttcctgcgctacggcttgggtattgagttctggatcgatctcttgctgaccatactgggatacatcccggggatcatctacgcggtgtatgtgctggtggcctgaacccagctttcttgtacaaagttggcattataagaaagcattgcttatcaatttgttgcaacgaacaggtcactatca

SEQ ID NO: 44 - protein, 54 aa, Oryza sativa
MASATFLEVLLAIFLPPVGVFLRYGLGIEFWIDLLLTILGYIPGIIYAVYVLVA

SEQ ID NO: 45 - DNA, 1058 bp, Oryza sativa
caaataatgattttattttgactgatagtgacctgttcgttgcaacaaattgatgagcaatgcttttttataatgccaactttgtacaaaaaagcaggcttaaacaatggttaagatcaaggaattccggatcgtcgtgcctatgtcgatggaagagtatgaaatagggatcagctacaccatcatgaagatggagcagcaaaacacgaacagcaaggagggcgtcgaggtgctgcaacaggtcccatttgaggatgagaagcttggcaagggccaatacacctcgaagaattatcatttgcagagcaaaattccatcttggatgaaaggttttgcgccagcaagtgcacttaccgtgcatgaggaatcatggtgcgcatatccaaacagcaggacagtgatcaagtgcccgctttttagcaagtgttcactgaccatcgacactgtgatcagacctgacaatggctgctctgagaacgcccacaatttaaccagtgaacaattagctgcaagagaggtagaggtcgtcgacatcgcgttgcagtcgagggactactggagcaaggtgatcagcgccccaaacgtcgacctgacagccttcaggtcgcagaggacgagccgaggccctctcttgaagggttggatggattcatgccgtcccgtcatgaccacgtacaagctggtgatcatggacgctccgatctggggcttgggtgaacgcctggaagactgcatcatcgcgggggagagggcgctgttcttggcgtgccaccggctgtgcttcgcgtggatcgacgagtggtacggcatgacgttggatcagatccgagagatggagcgtcagaccgacctgcttctcaagaagacgctgaagaagcctgcgaaggccgggagcaagcacgatggcaagaggaagacgctcaaagaggagattgtagctgtcgggagctgcacgtagacccagctttcttgtacaaagttggcattataagaaagcattgcttatcaatttgttgcaacgaacaggtcactatcagtcaaaataaaatcattatttg

SEQ ID NO: 46 - protein, 283 aa, Oryza sativa
MVKIKEFRIVVPMSMEEYEIGISYTIMKMEQQNTNSKEGVEVLQQVPFEDEKLGKGQYTSKNYHLQSKIPSWMKGFAPASALTVHEESWCAYPNSRTVIKCPLFSKCSLTIDTVIRPDNGCSENAHNLTSEQLAAREVEVVDIALQSRDYWSKVISAPNVDLTAFRSQRTSRGPLLKGWMDSCRPVMTTYKLVIMDAPIWGLGERLEDCIIAGERALFLACHRLCFAWIDEWYGMTLDQIREMERQTDLLLKKTLKKPAKAGSKHDGKRKTLKEEIVAVGSCT

SEQ ID NO: 47 - DNA, 397 bp, Oryza sativa
cctgttcgttgcaacaaattgatgagcaatgcttttttataatgccaactttgtacaaaaaagcaggcttaaacaatgcagaacgaggagggtcagatggtggacctctacgtccccaggaagtgctcggccacgaacaggatcatcaccgccaaggaccacgcctcggtccagatcaacattgggcatgtggatgagaatgggctgtacgatggccgcttcaccacctttgctctctctgggttcatccgtgctcagggagatgctgacagtgctctggataggctgtggcagaagaggaaggctgaggtcaagcagcagtagacccagctttcttgtacaaagttggcattataagaaagcattgcttatcaatttgttgcaacgaacaggtcac

SEQ ID NO: 48 - protein, 82 aa, Oryza sativa
MQNEEGQMVDLYVPRKCSATNRIITAKDHASVQINIGHVDENGLYDGRFTTFALSGFIRAQGDADSALDRLWQKRKAEVKQQ

SEQ ID NO: 49 - DNA, 856 bp, Oryza sativa
tttgactgatagtgacctgttcgttgcaacaaattgatgagcaatgcttttttataatgccaactttgtacaaaaaagcaggcttaaacaatgctgtcctccaccgctctccggccgctggcgcagcccgccacggccacggccacggccaccgccttctcggcctcccgcacggccgccgcggctgggcggcgcgggtcggcggcgggggtagtggttcgcgcggtgcggaactacgactcgatcccgaagcgggagcccttcagctcgagccgcagcgtcctcgacgagttcctcaggcaggagaagcctctcgtccagcgcaccaaagaccagatcacagattattgcacaaccctagaaggtgatgagtgctgcagctgttgggatgcttactttgaactcaataaacttgagcaagagctacccaaagaggaaattgcaaggatggtgaaggactccgagggagatccgaggtacctgatcaataacatccatcaccgttcagatctaagaaagaagatggctgagaaatctcataattcactatcatcaaactccctggggcaagctgcgaagccaaggcctttccctgtgcctgacggattgccgaaaacacaggaagagcttgctgaagaacaggaggccctaatgccggagtcctcctatacgaggctactgagaagaatggggagatttcctgattggtatacgcctcgccccccagatgaaaccgaccatgaaaccgactgaatcaagtcaccaagcatccatataccgctccttgtgaaaattttgtattggttgccggataattatgatgcctgaagttctgtggtttgggtaatgcactaag

SEQ ID NO: 50 - protein, 220 aa, Oryza sativa
MLSSTALRPLAQPATATATATAFSASRTAAAAGRRGSAAGVVVRAVRNYDSIPKREPFSSSRSVLDEFLRQEKPLVQRTKDQITDYCTTLEGDECCSCWDAYFELNKLEQELPKEEIARMVKDSEGDPRYLINNIHHRSDLRKKMAEKSHNSLSSNSLGQAAKPRPFPVPDGLPKTQEELAEEQEALMPESSYTRLLRRMGRFPDWYTPRPPDETDHETD

SEQ ID NO: 51 - DNA, 756 bp, Oryza sativa
atggttgtgtacgagcaggatccggatgttctccgatggagccttcaccttcttcttccacccgccgctgccctacactaccaacaacgcaccagcagcgtcgactgcgatgagatgatcgcccacgccctccaggaggagctttcctacgcccaatcccaatccctatcctcctccatcctccatctccccccctctgctcctccactaaaggaagacgaacaagatgatgcgccaccaccaccacccccctttagttcttgttcaacccctgcagattatactaatactaataatcataatgcccatgactgcttaatcgagtttgtcgatgatttctctgctctagatggccaagttggcaaaagattacacgacatgattcccattcctcatgttccaaaaactaacggggacattccttctgttgatgaagccttttcagatcaccaaagactccttcacaggttggagctgtatgatcttgctgagctcaaggttgaaggggatggcaattgtcagttccgagcattgtccgatcaattttaccgcaccactgaacaccacagatttgttcggcaacaaatagtgaaacagcttgagtcttatccggaaatttatgcaggatatgtccctatggattatagggaatatctaaaaaagatgataaagaacggggagtggggtgaccacgttacattgcaggctgctgcagactcggtaaagatgatgtttccacacttcctgacttattaa

SEQ ID NO: 52 - protein, 251 aa, Oryza sativa
MVVYEQDPDVLRWSLHLLLPPAAALHYQQRTSSVDCDEMIAHALQEELSYAQSQSLSSSILHLPPSAPPLKEDEQDDAPPPPPPFSSCSTPADYTNTNNHNAHDCLIEFVDDFSALDGQVGKRLHDMIPIPHVPKTNGDIPSVDEAFSDHQRLLHRLELYDLAELKVEGDGNCQFRALSDQFYRTTEHHRFVRQQIVKQLESYPEIYAGYVPMDYREYLKKMIKNGEWGDHVTLQAAADSVKMMFPHFLTY

SEQ ID NO: 53 - DNA, 655 bp, Oryza sativa
gtacaaaaaagcaggcttaaacaatggtggtggagacggagacggggagagatgagagcgaagcggcggcggcgacggcgagcgccatggacgacgggccatgcggcgaaagcgaaggaggaggagacgcggcggcgaaggccgtaggagcgaaggacgcgggcgaaggagacgagccgaaggaggaggaggaggacgggagagatcgagaggaggaagaggaggaggcggcgaagcgcgggtggtcggagatacggctggcgatcgaggagctctccgccgtcgacgtcgagcgccgcggcgggaagccgccgccgccgttgccgcctcctcccacgctgaccttcctcgcgctctctcacctcctcctccaggtgctcgataagatcggtccgaccatggctgtgctgaggctcgacgtccaacgaaacatcgagaggctgcaggagttgtacttgttggacccatccaaatactataatctagaggagatactggagaaggaggtagatgagggcactgcaaggaaggttgatagctgcgcgagagctattctttggcttactagatccatggatttcactattgcactattacagagattggaggaggattctgatcagaagtgttttgcacagcttgtagacccagcttt

SEQ ID NO: 54 - protein, 94 aa, Oryza sativa
MRRKRRRRRRGGEGRRSEGRGRRRRAEGGGGGRERSRGGRGGGGEARVVGDTAGDRGALRRRRRAPRREAAAAVAASSHADLPRALSPPPPGAR

SEQ ID NO: 55 - DNA, 2407 bp, Oryza sativa
tcctgccgcccacccctccgggccgttgcttcacaacgttcaaatccgctcccggcggatttgtcctactcaggagagcgttcaccgacaaacaacagataaaacgaaaggcccagtcttccgactgagcctttcgttttatttgatgcctggcagttccctactctcgcgttaacgctagcatggatgttttcccagtcacgacgttgtaaaacgacggccagtcttaagctcgggccccaaataatgattttattttgactgatagtgacctgttcgttgcaacaaattgatgagcaatgcttttttataatgccaactttgtacaaaaaagcaggcttaaacaatggctggacatcagtataataattcccagatgtcccggatggatcatatggacaggctaaacaatgaacctccaccttttggccaaaagttatttatgcatcctaggagtgatccagctaacggagctggatcgtctggctatgtgggtaacacaatgagatcgaatgatcttccgtcttcaagttatgctggccaagcttatggtcagcagaatagagcccccatccatgcttcatattctggtcatgcacctgctggaagctctagtggtagctatgcaccatacaatactcaacatatgcctgcttcaagctatccacacggatccgaggataatttcattccaagttcccatgtggatggcagaagggttgcattgaagagaagaaatcccatcattcatcctacagatggattcggtgtcggaaattattatgctggcagttcttccaatactcagttctctcggcccatgcctccaaatcctattccacctcctgaatcctgtgttcgaatgccctcacacttgggttcgaaccactggaatgatcaccgctatgttaatcatgaaggatctcagaggaatgtgaggggaagacatgatcatagtactatccatttggaacaaagtccagctgcagcttgcccgtcaagcagcatcaatgtgccaccataccatccaaatgcaaatggtccttttggaagtgcaccagtacaacgtgacagagctcctttatctgtgcatccaagaattcttcctccagggcctgatggtagtagcatagcattcagagagaggccatactatcctgctccacagagcaccaacataagtgcacctgtgccaacgcttcctatttcttgtgacagtgcaccatttgctcatggtgggtacgcccctagatcagctcatcgtaacaacttacgcacttatcctcctccagcttttgcatcttcttccaaccctggagcagtctcccatgagccagctattcctagctatccacctgctgcccctagctatccacctgcaacctctgcagcatcatcaagtgtccagccatttcatgctgaagctgctgcacatttgaggcatccaaggcatgtatctgtagggggcagtggtagtgcaaggagtagaaggatgagggattcctatcatggttttcatcatttgatgattgaagacaataacttgggaagatcagcatctgagcggtttatgatgctggatcagttagttatccatgaatcaagagaagcattcgatcctcactgggacatgagactggacattgatgacatgagctatgaggagctgctggctttggaagaacgcataggccatgtgaacactggcctcgctgatgagaaaatttctggctgtgtgatggaggtagcctgctgcagcagtagtcatttgcaggatgatcaggacaatgaaagatgtgtaatctgcctggaggaatacaagcatgaggacacacttgggaggctgaaatgcggccacgggtttcactgcaattgcatcaagaagtggctgcaggtgaagaacacctgcccagtttgcaaagctgctgccgcagatgaaggcagctgaacccagctttcttgtacaaagttggcattataagaaagcattgcttatcaatttgttgcaacgaacaggtcactatcagtcaaaataaaatcattatttgccatccagctgatatcccctatagtgagtcgtattacatggtcatagctgtttcctggcagctctggcccgtgtctcaaaatctctgatgttacattgcacaagataaaaatatatcatcatgatcagtcctgctcctcggccacgaagtgcacgcagttgccggccgggtcgcgcagggcgaactcccgcccccacggctgctcgccgatctcggtcatggccggcccggaggcgtcccggaagttcgtggacacgacctccgaccactcggcgtacagctcgtccaggccgcgcacccacacccaggccagggtgttgtccggcaccacctggtcctggaccgcgctgatgaacagg

SEQ ID NO: 56 - protein, 533 aa, Oryza sativa
MAGHQYNNSQMSRMDHMDRLNNEPPPFGQKLFMHPRSDPANGAGSSGYVGNTMRSNDLPSSSYAGQAYGQQNRAPIHASYSGHAPAGSSSGSYAPYNTQHMPASSYPHGSEDNFIPSSHVDGRRVALKRRNPIIHPTDGFGVGNYYAGSSSNTQFSRPMPPNPIPPPESCVRMPSHLGSNHWNDHRYVNHEGSQRNVRGRHDHSTIHLEQSPAAACPSSSINVPPYHPNANGPFGSAPVQRDRAPLSVHPRILPPGPDGSSIAFRERPYYPAPQSTNISAPVPTLPISCDSAPFAHGGYAPRSAHRNNLRTYPPPAFASSSNPGAVSHEPAIPSYPPAAPSYPPATSAASSSVQPFHAEAAAHLRHPRHVSVGGSGSARSRRMRDSYHGFHHLMIEDNNLGRSASERFMMLDQLVIHESREAFDPHWDMRLDIDDMSYEELLALEERIGHVNTGLADEKISGCVMEVACCSSSHLQDDQDNERCVICLEEYKHEDTLGRLKCGHGFHCNCIKKWLQVKNTCPVCKAAAADEGS

SEQ ID NO: 57 - DNA, 3625 bp, Oryza sativa
gggccgttgcttcacaacgttcaaatccgctcccggcggatttgtcctactcaggagagcgttcaccgacaaacaacagataaaacgaaaggcccagtcttccgactgagcctttcgttttatttgatgcctggcagttccctactctcgcgttaacgctagcatggatgttttcccagtcacgacgttgtaaaacgacggccagtcttaagctcgggccccaaataatgattttattttgactgatagtgacctgttcgttgcaacaaattgatgagcaatgcttttttataatgccaactttgtacaaaaaagcaggcttaaacaatggtcatatctttgacttgcttttgtatctttgacagccgattggataggaatggttttacgggagcaatacctgctacaattggcagtttggtcaaactgaatgagctgtaagtgacatctgatcttaaaggaagagttatgacacttgaggcacctctcttgaaaatgttatcttctgcaggaacttagcaaacaacaagctaactggatcagtgccagatctcagcaacatgaccaacttgaatgttgtgtaagaaactaaccacccccatgcctcatcatccaatcatataatttgtctgcataactaaagattccactcttgaattgccagggatttgagcaacaacacatttgatccttcagtggcccccagctggttcacatctttaacatctcttgcttctgtgtgagttatccaaaacttttggaattttaaattttgtgtcgtcttgtgatgacaatttcatactcatctctatatgttttgatcactcagttcaatagtttctggaagtctttctggccaggtcccaaaggggctcttcacattgcccacactgcagcaagtgtaattttctggtaacttacaactcaacatataagctttaaaaaaaagtgtcttatctctgcctattttgtggccaatcggacagtgtgctgagcaacaaccaattcaacgggacacttgaaattacaggcaacatcagcagctcactgcagacagtaaatctcatggacaaccgaatagtttctaccgatactgcaagctacaagaaaactctactgtaagaacctgcaaactcaataagaaccaagaacaccatacaatcttcgtcttctctcctacctttcaccaacattgcctcacttctcatgccatatcctgtctgcagcctggcaggtaatccgttttgcgccgagcaagatcccaacaacagagccttctgcagcaggcagctacagaacgcgagcccatacagtaccagtatggaaaaatgcggctcagctcagtgcagtgatggtcagaacgtgaaccctgcaagctgcggctgtgctttctcatacaacggcaagatggttttcagggcacccttcttcgtcgacttggtgagcagtacgccgttccagctgctggagtcgaccatggcggcaaagctgaacctgctccctggctcggtcgctctctcagacatccacttcaacagtgacaactacctccaagttcaagtgaagctgttcccaacatccggggtgaccttcaacctgtcagaattgacaaggattggttcttctctcagtaaccagatttacaaaccaccagcaaattttggaccttatttcttcattgcagacccatatgcccccttggcaggtacttggatttcactgtgtcgagactcccactttatttgcactgaagtagttttagttttcctctgattttgtgtgtgccagttgctcttggtggcaaaaaatccaagatgagcacaggtgccatagctggaattgcagtagccggtggggtccttgttatcgccctcattttcatgtcattgtttgctctccgacagaagagaagggctaaggaactcaaggaaagagcagacccttttggtaaggatctaaaagctcataggtatcatgtcactgttttctgatccaaaattttcagcttcatgggctgctggccagaaggacagtggaggggctccacagttgaagggagcaaggttcttctcctttgacgagctcaagatctgcaccaacaacttctctgacaaccacgagatcgggtcaggaggctacgggaaggtgtacagagggattctcggtgacggaacccgtgtcgccatcaagcgtacagaccgcaactcaatgcagggcgctgtggagttcaagaacgagatcgagctgctgtccagggtgcaccaccgcaacctggtcagcctcattggcttctgctacgagcaaggtgaacagatgctcgtctacgagtacatctccaatggcacactcagagagaacttgacgggtaaatccacatcccataattaacattgccatgaatctgattacacattttatttcgccatttcgtttgcattgctaaaatgattcttttatcaaatgttaactgaaaaggttttgatttgcaggaagtgggatgtacttggactggaagaagaggctgaggatcgcgcttggctcggccagagggcttgcctacctgcacgagctcgctgacccaccgatcatccaccgcgacatcaagtccaccaacatcctcctcgacaacaacctcaaggccaaggttgccgacttcgggctctccaagctcgtggccgacactgagaagggccatgtctccacccaagtcaagggaacactggtaaattcccctcactatccgctcatgccaatctcctgacagaactggacccggagtactacatgacgcagcagctgtcggagaagagcgacgtgtacagcttcggggtggtgatgctggagctggtgagcgggaggcagccgatcgagaaggggcggtacgtggtgcgggaggtgcggctggccatcgacccggccgaccacgaccaccactacggcctccgcgggatcgtcgacccggccatccgcgacgccgcgcgcaccccggtgttccggcggttcgtgcagctggcgatgcggtgcgtcgacgagtcggcggcggcgcgcccggccatgggcgccgtggtgaaggagatcgaggccatgctgcagaacgagcccgacgacgccggcgccggggagggggacagctccgccgacccgtccgccaacgagttcgaccgccaccgcggcggtggcggcccgccggcgcacccctacagcgacgtggagatcagccggggatcgtacgccggtgatggcgcgtcggattacatgccctattttgaggtcaagcccaagtagacccagctttcttgtacaaagttggcattataagaaagcattgcttatcaatttgttgcaacgaacaggtcactatcagtcaaaataaaatcattatttgccatccagctgatatcccctatagtgagtcgtattacatggtcatagctgtttcctggcagctctggcccgtgtctcaaaatctctgatgttacattgcacaagataaaaatatatcatcatgatcagtcctgctcctcggccacgaagtgcacgcagttgccggccgggtcgcgcagggcgaactcccgcccccacggctgctcgccgatctcggtcatggccggcccggaggcgtccc

SEQ ID NO: 58 - protein, 737 aa, Oryza sativa
MVISLTCFCIFDSRLDRNGFTGAIPATIGSLVKLNELNLANNKLTGSVPDLSNMTNLNVVDLSNNTFDPSVAPSWFTSLTSLASVSIVSGSLSGQVPKGLFTLPTLQQVVLSNNQFNGTLEITGNISSSLQTVNLMDNRIVSTDTASYKKTLLLAGNPFCAEQDPNNRAFCSRQLQNASPYSTSMEKCGSAQCSDGQNVNPASCGCAFSYNGKMVFRAPFFVDLVSSTPFQLLESTMAAKLNLLPGSVALSDIHFNSDNYLQVQVKLFPTSGVTFNLSELTRIGSSLSNQIYKPPANFGPYFFIADPYAPLAVALGGKKSKMSTGAIAGIAVAGGVLVIALIFMSLFALRQKRRAKELKERADPFASWAAGQKDSGGAPQLKGARFFSFDELKICTNNFSDNHEIGSGGYGKVYRGILGDGTRVAIKRADRNSMQGAVEFKNEIELLSRVHHRNLVSLIGFCYEQGEQMLVYEYISNGTLRENLTGSGMYLDWKKRLRIALGSARGLAYLHELADPPIIHRDIKSTNILLDNNLKAKVADFGLSKLVADTEKGHVSTQVKGTLGYLDPEYYMTQQLSEKSDVYSFGVVMLELVSGRQPIEKGRYVVREVRLAIDPADHDHHYGLRGIVDPAIRDAARTPVFRRFVQLAMRCVDESAAARPAMGAVVKEIEAMLQNEPDDAGAGEGDSSADPSANEFDRHRGGGGPPAHPYSDVEISRGSYAGDGASDYMPYFEVKPK

SEQ ID NO: 59 - DNA, 1710 bp, Oryza sativa
tattttgactgatagtgacctgttcgttgcaacaaattgatgagcaatgcttttttataatgccaactttgtacaaaaaagcaggcttaaacaatggaggtcttcggccccgtcacgcccggccaagtttcgtttttgctgggtcttttccctgtcctcattggatggatctacgccgaaatcctagaatacaggaaatctttgttgtatgggaaagttcactcggatgctaatttggagaatgagactatgaaggaagatgataaggctgtattacttgaaggagggcagtcaaaatcgccatctacaaagctccgaaacatgtctacaaaagcaaatttaatacggtttataacaatggacgagtcttttctgcttgaaaaccgtgctgtgctaagagcaatggccgaagtgggcattattctggtctacttttacatttgtgaccggacaaatatatttccagaaactaagaagagctacaaccgcgacctgtttctgtttctgtacattcttcttatcatagcatcggcacttacttcacttaagaagcacaatgaaaaatcagctttcactggaaagtcaatactctatcttaatcgtcaccaaactgaggaatggaaagggtggatgcaggtcttgtttctgatgtaccactatttcgctgccacagaaatatacaatgcaattcgggtgttcactgctgcctatgtctggatgactggattcgggaatttctcatattattatatcaagaaagattttagcattgcaagatttgcacagatgatgtggaggctaaatttctttgtggccttctgttgcattgtccttgacaatgattacatgctgtattatatatgtccaatgcacacactttttactctgatggtatacggatcacttggtctgttcaacaagtacaatgagaaaccatctgtcatggctattaagattgcttgctgcttcttgactgtcattttgatatgggaaattcctggggtatttgaatttttatgggccccctttacatttcttctaggatataaggatccagagccttccaaggcaaacttacccctgctacatgagtggcatttccgatctggccttgatcgatacatatggattattggaatgatctatgcttacttccaccctaatgttgaacgttggatggagaagttggaggaatctgagactaaggttagactgtttatcaagggagccattgtcactctttctttgacggctggttacctatggtatgaatatatctacaggctagacaaaattacatacaacaagtaccatccctacacgtcatggattcctatcactgtttatatctgcctacgcaactgcacccagcagttgaggagtgcctccttggctcttttcgcctggcttggcaagatcacactagagacatacatttcccagattcacatttggctcagctatcataccgggtgtttgagatcacaggtgtactgaagggagcttttattcccagtagagacaacaatcggctatatcaaaattttattgcagggattgccatatctgcatgcctgtatttctgctcacttattcttgtgaaaattactattgtatagacccagctttcttgtacaaagttggcattataagaaagcattgcttatcaatttgttgcaacgaacaggtcactatcagtcaaaataaaat

SEQ ID NO: 60 - protein, 467 aa, Oryza sativa
MEVFGPVTPGQVSFLLGLFPVLIGWIYAEILEYRKSLLYGKVHSDANLENETMKEDDKAVLLEGGQSKSPSTKLRNMSTKANLIRFITMDESFLLENRAVLRAMAEVGIILVYFYICDRTNIFPETKKSYNRDLFLFLYILLIIASALTSLKKHNEKSAFTGKSILYLNRHQTEEWKGWMQVLFLMYHYFAATEIYNAIRVFTAAYVWMTGFGNFSYYYIKKDFSIARFAQMMWRLNFFVAFCCIVLDNDYMLYYICPMHTLFTLMVYGSLGLFNKYNEKPSVMAIKIACCFLTVILIWEIPGVFEFLWAPFTFLLGYKDPEPSKANLPLLHEWHFRSGLDRYIWIIGMIYAYFHPNVERWMEKLEESETKVRLFIKGAIVTLSLTAGYLWYEYIYRLDKITYNKYHPYTSWIPITVYICLRNCTQQLRSASLALFAWLGKITLETYISQIHIWLSYHTGCLRSQVY

SEQ ID NO: 61 - DNA, 2416 bp, Oryza sativa
tagtgacctgttcgttgcaacaaattgatgagcaatgcttttttataatgccaactttgtacaaaaaagcaggcttaaacaatgatggaggtggagaagccatgggagttgaaggaggatgtggagatcatgacggaggaggaggaagaagacgacagcagcaacctgctgcaggccaggggcaggaacaagaagcacgcgctcatcaatggagatgaacaacaacaacaacaagaagaagaagaagaagaagaggttgttgaggagcacaagagcgtcttctttgatccaacccaagtttctgagcatgttactgaagtaagtggtaagaatgaagttacaagagtggagcagttcgttgctaaaaaggaaaaggcgcatgaaacatcaagttcaaagggaaaagaacttgagacacaggaaaatgctaattctcaagaaactaatgaaaattctaataacagcagtttggagaacagatcaccttcaaatggttcacatgaagtctgtaacagtggtgaaacagttacagttgcaaatggaaaagcaggcttgaaagtgatcacaatcattgacaagaaccaaaacggcctggcaaactcaaatggttctcttcacattgccaatgtcagcatgaacaaaactagtgtccatgaaattgaagctgagaaggatgaagatgtcattaagggcaaagtgaacattgaagagtatgaccttgagaaaattcttgatgagcaagaaactcatgacctgttctgtcccaattgcaactcatgcataactcaaagggtgattctgcggaagagaaaaaggacagtaagacaaacatcacctgatgaaccaccaaagaaaacacagattgcagagccttctgctaatacttcaaatcagactgtacctgaaagacaagggcaagagtcacctgacatattcagatgtttatcatgcttcgccttcttcattccaacaggttgtggctttaacatattccgtatatttggaaggacggaagtgaaccaagaagctcaggtacaggaagctgctgcatcaggtcagatgtctggctccgacaattgtgcaagttggcttttttcttgtttcgagcctggagacggtccaaagaaaactgatgcaggtccagaaaaggagccactattacctgacaagcaggactccaataatggttcagcttcatcagttgaaggtagcacagcatccgttcatagtcatggcataagtgtacaacaacaagaatcaaagagaccattgccagctgagtcatcttcccaacttcaacccagcaatacaaagaaagaagacttcggaacagtatcgttcagtggatcatcatcggtagaagctccttcatcgtcatctgctagcattatcaaccctggacagaccgcgacaggattccttcagactggggaaacacatgtggtgattgggcagcaggacatcgtactgcaacagaacgttcctcttccaaagcctggagatgcagctcacctagataaacagaaacaagaaactccaccagcaagccacacatttcctacaccgggagtcaagatcccagatgcaaatccagctaaatttataccagatgtggtgaggccaatggtagataaaccaagtcgaggcattgtgattcctcctgaagcagttgagtcacaaactcgacctgagcattcatcagtgcaaatagggcctgatgcgagcatgccattgattgatactcctgcaccagagcaaagggatgattgggacatcctgaaagctatcgtatacggtggcctcgtggaatcgatcaccagcctctctgtggtttcagcagctgcatccagcggcgccaggacattggacatattcatcttgggcatagcaaacctcatcggtggacttcccatcatctttcacagcatggctgagctgagaagcattggagatgtggatgagagggaggagcagggcggtcactactggttgcagctggggaggcgatccaagtaccggctgcatgtcgccatggccgtgctgtcctacctcctcttcggcctgctgccgccgctcatctacggcctctccttccgcggcggcgacgtgagggagaagaagatggtggcggtggcggcggcgtcgctggggtgcatcgcgctgctggccatgggcaaggcacacgtggcacggaggcggagctacgtgaagagcctcctctactacctgagcattggcgtgagcgcgtcgggcctctcgtacgtcgccggcctcctcgcccactttgccctcatcacccaccaaacccctcctgcttcatcctcctgggcttcatactgaacccagctttcttgtacaaagttggcattataagaaagcattgcttatcaatttgttgcaacgaacaggtcactat

SEQ ID NO: 62 - protein, 752 aa, Oryza sativa
MMEVEKPWELKEDVEIMTEEEEEDDSSNLLQARGRNKKHALINGDEQQQQQEEEEEEEVVEEHKSVFFDPTQVSEHVTEVSGKNEVTRVEQFVAKKEKAHETSSSKGKELETQENANSQETNENSNNSSLENRSPSNGSHEVCNSGETVTVANGKAGLKVITIIDKNQNGLANSNGSLHIANVSMNKTSVHEIEAEKDEDVIKGKVNIEEYDLEKILDEQETHDLFCPNCNSCITQRVILRKRKRTVRQTSPDEPPKKTQIAEPSANTSNQTVPERQGQESPDIFRCLSCFAFFIPTGCGFNIFRIFGRTEVNQEAQVQEAAASGQMSGSDNCASWLFSCFEPGDGPKKTDAGPEKEPLLPDKQDSNNGSASSVEGSTASVHSHGISVQQQESKRPLPAESSSQLQPSNTKKEDFGTVSFSGSSSVEAPSSSSASIINPGQTATGFLQTGETHVVIGQQDIVLQQNVPLPKPGDAAHLDKQKQETPPASHTFPTPGVKIPDANPAKFIPDVVRPMVDKPSRGIVIPPEAVESQTRPEHSSVQIGPDASMPLIDTPAPEQRDDWDILKAIVYGGLVESITSLSVVSAAASSGARTLDIFILGIANLIGGLPIIFHSMAELRSIGDVDEREEQGGHYWLQLGRRSKYRLHVAMAVLSYLLFGLLPPLIYGLSFRGGDVREKKMVAVAAASLGCIALLAMGKAHVARRRSYVKSLLYYLSIGVSASGLSYVAGLLAHFALITHQTPPASSSWASY

SEQ ID NO: 63 - DNA, 215 bp, Oryza sativa
tttgtacaaaaaagcaggcttaaacaatgtataacgctccaatggcacaggacatgtcctactatgaacatgtgcagaggcgccatgaggagaagggttgcctctatgcatgcatcttcactgcactgtgctgcttctgctgctacgagacctgcgagtgctgcctcgactgcctctgctgctgctgcaactagacccagctttcttgtacaaag

SEQ ID NO: 64 - protein, 55 aa, Oryza sativa
MYNAPMAQDMSYYEHVQRRHEEKGCLYACIFTALCCFCCYETCECCLDCLCCCCN

SEQ ID NO: 65 - DNA, 1237 bp, Oryza sativa
atagtgacctgttcgttgcaacaaattgatgagcaatgcttttttataatgccaactttgtacaaaaaagcaggcttaaacaatggcggcgcgtgttgttgtggcgttcgcggttgcgtccgccatgttcgtggccgtctccggccagaagttcaacgccatcttcagcttcggcgactccatgtccgacaccggcaacctctgcgtgaacggcccccccgccggcctgacgctcacccagcctccctacggcgagaccttcttcggccgcgccacctgccgctgctccgacggccgcctcgtcgtcgacttcctcgcggagaagttcgggctgccgttgctgccgccgtcgaagaggggcggctccgacttccggcgaggcgcgaacatggcgatcatcggcgccaccaccatggactccggcttcttccagtcgctcggcatcggcgacaagatctggaacaatggccccctcaacacccagatccagtggttccagcagctcatgccctccatctgcggctcatcttgcaagacgtacctgtccaagtcgctgttcgtgctcggcgagttcgggggcaacgactacaacgcgcagctgttcggcgggtacacgccggagcaggcggcggggcagagcggcaccatcgtggacgggatcgggaagggggtggagcagctgatcgggctgggcgccatgtacgtcgtcgtccccggcgtgctccccgtcggctgcttccccatctacctcacgctgtacggcacctccaacgccggcgactacgaccagtacggctgcctcacccgcttcaacaccctctcctcccgccataactccctcctccaggccaaggtctcctccctccagagcaagtacccctgggctcgcatcatgtacgccgacttctactcccacgtctacgacatggtcaaatccccctccaactacgggtttagcacgaatttgagggcgtgctgcggggcgggaggagggaagtacaactaccagaacggcgcgaggtgcggcatgtcgggagcctacgcgtgctccaacccgtcgtcgtcgttgagctgggacggcatccatctcacggaggcggcgtacaagcagatcgccgacgggtgggtcaacgggccctactgccacccgccgatcatgccctagacccagctttcttgtacaaagttggcattataagaaagcattgcttatcaatttgttgcaacgaacaggtca

SEQ ID NO: 66 - protein, 360 aa, Oryza sativa
MAARVVVAFAVASAMFVAVSGQKFNAIFSFGDSMSDTGNLCVNGPPAGLTLTQPPYGETFFGRATCRCSDGRLVVDFLAEKFGLPLLPPSKRGGSDFRRGANMAIIGATTMDSGFFQSLGIGDKIWNNGPLNTQIQWFQQLMPSICGSSCKTYLSKSLFVLGEFGGNDYNAQLFGGYTPEQAAGQSGTIVDGIGKGVEQLIGLGAMYVVVPGVLPVGCFPIYLTLYGTSNAGDYDQYGCLTRFNTLSSRHNSLLQAKVSSLQSKYPWARIMYADFYSHVYDMVKSPSNYGFSTNLRACCGAGGGKYNYQNGARCGMSGAYACSNPSSSLSWDGIHLTEAAYKQIADGWVNGPYCHPPIMP

SEQ ID NO: 67 - DNA, 1330 bp, Oryza sativa
ttgatgagcaatgcttttttataatgccaactttgtacaaaaaagcaggcttaaacaatgacgaaccaggacgtggtgatgccggacatcgcggcggccgcggccatgccggggtcatccggccgcgcgccgctcttcgcgtgccgtggcgccgcggccgtgtcggcgtcctccatgctcggcggcggcggcgcggcgtaccaggccgcggtggtggcgcacgtggcgccggtgccagctatcaggccgtgcgccagctgggtcgtcgaggccatgcgcgcgtcgtcgccgacacggcccgccgccgccgcggtcgacgccgagtacgacgcgtggacgcagaggaagcacccgtcggcgctgggcagcttcgagcaggtggccgcggcggcgagcgggaagcgcgtcgtcgtgttcctcggctacgacggcaccctctcccccatcgtcgccgaccccgacatggccttcatgtccgacgagatgagggcggccgtgcgcgacgtggcggagcacttcccggcggcgatcgtgaccgggcgctgcgtcgacaaggtgcagagcttcgtcggcctcccggagctctactacgccggcagccatggcatggacatcaagggccccagctccaacgaggaagaagacaccaagatcctcttgcagccagctcgcgagttcctcccggtgatcaacaaggcttacaaggctttgatggagaagacgaagagcacgcctggggccagagtggagaacaacaagttctgcctctccgtgcacttcagatgcgtcgatgagaagagatggaatccgttggcagagcaagtgaaggccgtgctccgggactaccccgagctcaaactcacccaaggaagaaaggtcctggagatccggccgtcgatcatgtgggacaagggcaaggcggtggagttcttgctgaaatctctcggattcgacgacgaccgccgcgacgtcctgccggtgtacatcggagacgaccggaccgacgaagatgctttcaaggtgttgagaaagagaggtcaagggttgggaattcttgtctccaagtgtgccaaggagactgacgcctcgtactctctccaggacccagcagaggtcatggagttccttgttcgattggtgcagtggaagcttcggtgatcatcgtcagcgatgcgcccgagggtttaattagtacactgacgacggatcatatatactatatgacagtcttccctgctaagctagctctgacttctgaagaagtttgaacccagctttcttgtacaaagttggcattataagaaagcattgcttatcaatttgttgcaac

SEQ ID NO: 68 - protein, 366 aa, Oryza sativa
MTNQDVVMPDIAAAAAMPGSSGRAPLFACRGAAAVSASSMLGGGGAAYQAAVVAHVAPVPAIRPCASWVVEAMRASSPTRPAAAAVDAEYDAWTQRKHPSALGSFEQVAAAASGKRVVVFLGYDGTLSPIVADPDMAFMSDEMRAAVRDVAEHFPAAIVTGRCVDKVQSFVGLPELYYAGSHGMDIKGPSSNEEEDTKILLQPAREFLPVINKAYKALMEKTKSTPGARVENNKFCLSVHFRCVDEKRWNPLAEQVKAVLRDYPELKLTQGRKVLEIRPSIMWDKGKAVEFLLKSLGFDDDRRDVLPVYIGDDRTDEDAFKVLRKRGQGLGILVSKCAKETDASYSLQDPAEVMEFLVRLVQWKLR

SEQ ID NO: 69 - DNA, 2192 bp, Oryza sativa
tgactgatagtgacctgttcgttgcaacaaattgatgagcaatgcttttttataatgccaactttgtacaaaaaagcaggcttaaacaatgcttgtcctcttgctcctcctcgccgccgccgccgccgtctcttcgccggcgccggtggccggcgacggcgggggcgccttgccggtgctcaacccgatctcctccttctgtaacacgacggcggccaggcggacgtacctgccgaacagcacgttcgaggccaatctcaacggcctcttcgccgtgctgtccaggaacgcctcggcgtcgggctacgcggcgggggcgttcggcgcggcgccggacacggcgtacggcctcttgctctgccgcggcgacttcaccgggaacgactgctccgccgcgcggctggcgtcgtcgttccagcaggcggcgagcagctgcttgtacagcaaggacgtcgccgtctactacgaccagtaccagctccggtactcggaccaggacttcctcgccggcgccggcgccggcgccgccaacgagccggagacggccgcgttcaacatgaacaacgtctccgacgcgggcgacgtcgcggcgttcgacgcgctggtggcggagctggtgaacgcggtggccgacagggcgagcaacgcgaccaggaggtacgccgcggggaaggccgggttcgcgccggaggcgatgaccgtgtacgccatcgcgcagcgcacgccggacctgtcgccgccgcagtgccggggctgcctcgccggtatcatcgaccagatgcccaagtggttcagcggccgcgtcggcggcaggatcctcggcgtgcgctgcgacttcaggtacgagaaggatccattcttcaagatccccaacgacatggtggtgcttagcccgctcccggatccgtcgtcacaagggagcagcagcagcggtggcctgtggatcgtggcgatcgtcgtccccgtcgccgtgctcctcctcggcttcttgggatgtttcctctggatcaggaggcgaagaaggagagtgatcaacatggcagggacggtgagcgtgccgaccatgtccatggagatggagcaggtgctcaagctgtggcggatcgaggagagcggctccgagttctcgctctacgacttcgaccagatcgccgacgccaccgacaacttctccgacgcctgcaagctcggccagggcggcttcggccctgtctacaagggtcaattgcctgatgggcttgagatagcgatcaagaggctctcatcctgttcagtgcgggggctgatggaattcaagacagagatccagctgatagccaagctgcagcacaccaacctggtcaggctgctgggctgctgcgtccaggctgacgagaagatgctcatctacgagtacatgcacaacaagagcctcgattgcttcatctttgacactgaaaagggggcgatgctgaactgggacaaacgcttccgtataatcgatggcattgcccaggggcttctttacctgcacaagcactctcggttgcgagttattcacagggatctgaaagcaagcaatatactcctcgaccgggagatgaaccccaaaatctcggattttggaatggcaaggatattctgctcgaatgtgacagaagccaacacgaccagggttgtgggcacacatggttacatcgctcctgagtatgcttctgagggtctcttctcgatcaaatccgacgtgttcagcttcggtgtcctgcttctcgagatcataagcggcaagaggaccgccggattctaccagtacggcaaattcttcaatctcacaggatatgcgtaccagctatggcaagaagggcaatggcacgagctggtggaccaggcgctgggggaggacttcccggcgatggaggtgatgaagtgcgtgcaggtggcgctgctgtgcgtccaggacagcgccgacgaccggccgaacatgtccgacgtgatcgccatgctcggcagcgagggggtgacgatgccggagccgaggcagccggcgtacttcaacgtcaggatctccagcctggccgtgtcgtccagctccttcggcgagtcgtactgcatgagcaacgtcacgttgatggaggaggacggcagatagacccagctttcttgtacaaagttggcattataagaaagcattgcttatcaatttgttgcaacga

SEQ ID NO: 70 - protein, 679 aa, Oryza sativa
MLVLLLLLAAAAAVSSPAPVAGDGGGALPVLNPISSFCNTTAARRTYLPNSTFEANLNGLFAVLSRNASASGYAAGAFGAAPDTAYGLLLCRGDFTGNDCSAARLASSFQQAASSCLYSKDVAVYYDQYQLRYSDQDFLAGAGAGAANEPETAAFNMNNVSDAGDVAAFDALVAELVNAVADRASNATRRYAAGKAGFAPEAMTVYAIAQRTPDLSPPQCRGCLAGIIDQMPKWFSGRVGGRILGVRCDFRYEKDPFFKIPNDMVVLSPLPDPSSQGSSSSGGLWIVAIVVPVAVLLLGFLGCFLWIRRRRRRVINMAGTVSVPTMSMEMEQVLKLWRIEESGSEFSLYDFDQIADATDNFSDACKLGQGGFGPVYKGQLPDGLEIAIKRLSSCSVRGLMEFKTEIQLIAKLQHTNLVRLLGCCVQADEKMLIYEYMHNKSLDCFIFDTEKGAMLNWDKRFRIIDGIAQGLLYLHKHSRLRVIHRDLKASNILLDREMNPKISDFGMARIFCSNVTEANTTRVVGTHGYIAPEYASEGLFSIKSDVFSFGVLLLEIISGKRTAGFYQYGKFFNLTGYAYQLWQEGQWHELVDQALGEDFPAMEVMKCVQVALLCVQDSADDRPNMSDVIAMLGSEGVTMPEPRQPAYFNVRISSLAVSSSSFGESYCMSNVTLMEEDGR

SEQ ID NO: 71 - DNA, 1093 bp, Oryza sativa
tttgtacaaaaaagcaggcttaaacaatggaaaaatcatatagctttatgtctggaagttctcttgactcatcaccatggtcatctatcggatctttagattccgaagcaagttttttgtctcttggttcatcagtttcatcagatgacctatctggttatgatagcttgcctttgttctcttcaatacatccagaagtcgctgtaaatggaaaagtagctctcagaggcaaatattctgttactagcatatatgctaaacaattccaagatcttcgaaagaagtgctgcccatctgagcttgcatatattacttccctaagtcgctgcaagaagtgggatgctcagggtggaaaaagtaaagctttctttgcaaagacagtggatgacaggttcatcataaagcaaataaagaagacagagtttgagtccttcataaaatttgcccctgattacttcaagcatgtttaccattctctagacactggaagccaaacttgccttgccaaaatattgggaatttatcaggttaagcaaacaaggcatggaaaagagataaagatcgatctgttggtgatggaaaaccttctcttcgggcacaatatttcacggatttatgatcttaaaggtgctatcttttcacgacacgttgcacactccaatgaccgtaatactgtttacttggatcaaaactacgtcgaggacatgcgtgtttctccgatttatattggtggaagaacaaagcatcttttgcaacgtgcaatctggaacgacacatcattcctcacttcggtcaacgttatggactattctctgcttgtgggagtggacaaagaaaagcatgagcttgtatttggcatcattgattatctgaggcagtacacttgggacaagcagctggaaacatgggtgaaaagttccctagtagtgccaaagaatgtttcaccaactgtagtttcacccaaggagtacaagaaaaggttccggaagttcatggcgaagcacttcctcacagttccagatacatggagttcagagaattcttccggaccaagcaaatcgtttgggcatagacccagctttcttgtacaaag

SEQ ID NO: 72 - protein, 355 aa, Oryza sativa
MEKSYSFMSGSSLDSSPWSSIGSLDSEASFLSLGSSVSSDDLSGYDSLPLFSSIHPEVAVNGKVALRGKYSVTSIYAKQFQDLRKKCCPSELAYITSLSRCKKWDAQGGKSKAFFAKTVDDRFIIKQIKKTEFESFIKFAPDYFKHVYHSLDTGSQTCLAKILGIYQVKQTRHGKEIKIDLLVMENLLFGHNISRIYDLKGAIFSRHVAHSNDRNTVYLDQNYVEDMRVSPIYIGGRTKHLLQRAIWNDTSFLTSVNVMDYSLLVGVDKEKHELVFGIIDYLRQYTWDKQLETWVKSSLVVPKNVSPTVVSPKEYKKRFRKFMAKHFLTVPDTWSSENSSGPSKSFGHRPSFLVQ

SEQ ID NO: 73 - DNA, 1316 bp, Oryza sativa
tttgtacaaaaaagcaggcttaaacaatgtctatcacctccgcttcccgccgcgccggcgccgccgcgctccccatcctccgacgaatcggcggcgcgttccgccgccccttctcgtcggagccggacccggcatcctccccggggtaccacgtcgccggcgggcccagcttcatgcgcggcgcggtgttctgggagcccggccgccctctcaccctcgaggacttccgcatgccgcgccccaaggccggcgagctcctcatcaagaccaaagcttgtggagtttgccactccgatctccatgttctcaagggtgagctcccattctccagcccctgcgttgttgggcatgagatcactggggaggttgttgaccatggtactcacacccctgctgagatcatcaacaggttcccagttggcagtcatgttgtgggtgccttcataatgccctgtgggaattgcttctactgtgttaagggccaagaagatctgtgtgagtctttctttgcatacaaccgtgctaaaggaacgctatacgatggtcaaacccgattattccttcgtagcaatggaaagccagtgtacatgtatagtatgggtgggcttgcagaatattgcgttgtgccagccaacgcactagcagttcttcccaactctttgccatacacagagtcggcgattctaggatgtgccgtgttcactgcatacggcgccctgaggcatgctgctgaaatgcgtgctggggattcagtagctgtgattggagtcggaggggttgggtcaagctgtttacagatagccaaagcctttggagcttccgaagtcattgcagtggatgttcttgatgagaaactccagaatgctagaacacttggagcaacccatactgtaaatgctgcaaaagaagatgcagttgaaaagattaaggaaattactgatgggaggggtgtggatgtagctgtggaagcacttggtaaggcattgacattttctcagtgcgccaaaagtgtacgagatggaggcaaagctgttatgattggccttgctgccacaaatgtgatgggggaggtggatataacccgtcttgttcgccgacaggtgaagatcattgggtcgtatggtgcaagggccaggcaagatcttcctcagatagtcaagcttgcagagagtggggccttcaatcttaagaacaccatatcaaggaaatgcaagtttgaagaggcgaacagcgcctacgaggatcttgaccgtggcaagatcgttgggcgagccgtagttgagatcatgtcgtagacccagctttcttgtacaaag

SEQ ID NO: 74 - protein, 422 aa, Oryza sativa
MSITSASRRAGAAALPILRRIGGAFRRPFSSEPDPASSPGYHVAGGPSFMRGAVFWEPGRPLTLEDFRMPRPKAGELLIKTKACGVCHSDLHVLKGELPFSSPCVVGHEITGEVVDHGTHTPAEIINRFPVGSHVVGAFIMPCGNCFYCVKGQEDLCESFFAYNRAKGTLYDGQTRLFLRSNGKPVYMYSMGGLAEYCVVPANALAVLPNSLPYTESAILGCAVFTAYGALRHAAEMRAGDSVAVIGVGGVGSSCLQIAKAFGASEVIAVDVLDEKLQNARTLGATHTVNAAKEDAVEKIKEITDGRGVDVAVEALGKALTFSQCAKSVRDGGKAVMIGLAATNVMGEVDITRLVRRQVKIIGSYGARARQDLPQIVKLAESGAFNLKNTISRKCKFEEANSAYEDLDRGKIVGRAVVEIMS

SEQ ID NO: 75 - DNA, 1094 bp, Oryza sativa
tttgtacaaaaaagcaggcttaaacaatggcgatggagggaccaatcctgtgtcgtgcagtgatgcaagctaagctacctgtcacgatgatcagcaactcactgaccaagtctgggcagcttgggaccgcattcctgggttgtgtgtgtaaatacaggaatatcactagactcatttccccaatctatcagccggcacaaaagaactttgctactgtttgcggtagcttcagctcgtcgtccgatggtaatggatatatggctggaaactttagtgagagtgatgaagattatgttaattctactgtgctagaagcagttgaggtgagaagtggggcagagggatatgtaatcaagatgcgagatgggaaaaacttgagatgtgtgcacaataattctcaagggagaaatattccagaaagcgcaccacaacctgctattgttttgaggattgaagatggaagtgaaactttacttccaatcattgttttggaaatgccaagcgtacttctgatggctgctattcggaatgtccacattgtaatatcttgttttattactacaatttgctccttttttttgcttgatgcgatttataaccctttctcattgcaggcaagaccaaccatatatcaagttgtgaaggagatgattgataagatgggttatgaggtaaaactggttcggataaataaaagaattcaagaagcatactgtgctgaactgtttctgacgaagaaactgcctatactgcaggtaggtgaccatacagaaagtatcacctttgatctaagaccttcagatgccataaacattgctgttcgctgcaaggttcctatacaagtccatagaagccttgcatacagtgatggcataagatcagtcgagccagcaagaatggcgatagcagccggcatgtctgacgggttgttgtttacagaacttgacagacctgatgggcagccatgtgtcgaggctcaagagtttggattgatccggaacatgctcattgcagctgttgaagagagatacaaagatgctggtaattttattatcgtgttgtggtgttattaaacccagctttcttgtacaaag

SEQ ID NO: 76 - protein, 348 aa, Oryza sativa
MAMEGPILCRAVMQAKLPVTMISNSLTKSGQLGTAFLGCVCKYRNITRLISPIYQPAQKNFATVCGSFSSSSDGNGYMAGNFSESDEDYVNSTVLEAVEVRSGAEGYVIKMRDGKNLRCVHNNSQGRNIPESAPQPAIVLRIEDGSETLLPIIVLEMPSVLLMAAIRNVHIVISCFITTICSFFLLDAIYNPFSLQARPTIYQVVKEMIDKMGYEVKLVRINKRIQEAYCAELFLTKKLPILQVGDHTESITFDLRPSDAINIAVRCKVPIQVHRSLAYSDGIRSVEPARMAIAAGMSDGLLFTELDRPDGQPCVEAQEFGLIRNMLIAAVEERYKDAGNFIIVLWCY

SEQ ID NO: 77 - DNA, 810 bp, Oryza sativa
atgaggctgttcgaggagccaccggcgaagctcacccactgggctcacccggagcacgagctgacgctggccgccaccgccggggcgccgttccggtgcgacgggtgccaggagcccggcggcgacgggccgaggtacaggtgcgcgccgtgcaacttcgacctccacaccgactgcgccctcccgccggccaccctgcagcacccgctcctcttcaagggcggcggctgcaccttcgtcttcctccgcgagccccccgcgcccgccgccgccagccggcagtgcgacgcgtgcggcgacgacgtgcgcgggttcgtcttccactgcgccgaccgcgacctcgacctccacccgtgctgcgcgagcttggaggaccgcatcgtcacgggcgggggcggcgacggcgacggccgcgtcttcgagctcaccaaggcggcgtcgtcgtcgtcgtcgcggcgccgctgcggcgtctgcggggacaagtcgcgcaggacgttctggttctaccgcggccgcttcgacggcgaggacgtgttcatccacgtggcgtgcgtgaaggagctcgccgtgcggaggtgggaggcgagctaccgccgccgcagcggcgccggccagatcgcgctcgccggcgcgccgctcatggagggcgccctgcagagcctgccaaggaggacgcggcggagcggcgggttcgagcggttcagcaagatcgtgggtgtcatcgtgagcgccataatcgccgtcatcttcgggaatccgatggggttgatcgccgcggtggccggccctgacggtcttctccgcgggtag

SEQ ID NO: 78 - protein, 269 aa, Oryza sativa
MRLFEEPPAKLTHWAHPEHELTLAATAGAPFRCDGCQEPGGDGPRYRCAPCNFDLHTDCALPPATLQHPLLFKGGGCTFVFLREPPAPAAASRQCDACGDDVRGFVFHCADRDLDLHPCCASLEDRIVTGGGGDGDGRVFELTKAASSSSSRRRCGVCGDKSRRTFWFYRGRFDGEDVFIHVACVKELAVRRWEASYRRRSGAGQIALAGAPLMEGALQSLPRRTRRSGGFERFSKIVGVIVSAIIAVIFGNPMGLIAAVAGPDGLLRG

SEQ ID NO: 79 - DNA, 321 bp, Oryza sativa
atggctggacacaaggtggtattctgcacttgcattctgatcttcatcgtcgtcgtcatctcaggccaggccgaagcccggaggctggcggcggtggccaacggcaatgaggatgccgtcgccgtggaaggtgacgggagcttcagagcagtgcaagaaactgcttcttctgcgtcgactgatcatgcagctgcaggtcgaggcggcggcggcgccgccaccgccgtacaaggaagcatgccaatgacgacgacggactcccgccctactgctcccgggaacagccccggcataggcaacaaggggaagatcaacaactag

SEQ ID NO: 80 - protein, 106 aa, Oryza sativa
MAGHKVVFCTCILIFIVVVISGQAEARRLAAVANGNEDAVAVEGDGSFRAVQETASSASTDHAAAGRGGGGAATAVQGSMPMTTTDSRPTAPGNSPGIGNKGKINN

SEQ ID NO: 81 - DNA, 1023 bp, Oryza sativa
atgggggacgcgctgtgggagatgctgggggaggagatggcggcggcggcggcggcggccggcgagcacgggctgccgccggggttcaggttccaccccaccgacgaggagctcgtcaccttctacctcgccgccaaggtgttcaacggcgcgtgctgcggcggcgtggacatcgcggaggtggacctgaaccggtgcgagccgtgggagctgccggaggcggcgaggatgggggagaaggagtggtacttcttcagcctccgcgaccgcaagtacccgacggggctgcgcaccaaccgcgccaccggcgccggctactggaaggccaccggcaaggacagggaggtggtcgccgccgccgccgccggcggcgcgctcatcggcatgaagaagacgctcgtcttctacaagggccgcgccccgcgcggcgagaagaccaagtgggtcctccacgagtaccgcctcgacggcgacttcgccgccgctcgccgctccaccaaggaggaatgggtgatctgcaggatctttcacaaggtaggagatcagtacagcaagctgatgatgatgaagagcccagccagctactacctcccagtgagccaccaccaccccagcagcatcttccatgaccttcctccggtcccattcccaaaccctagcctcgtccccttccaccatgatctccccacaagcttccatcctccattgctgcagcacagccatgcgaacagcaagaacagcagcagcaacaatggcggcttcgtcttccccaatgagccaaacaccacaaacagcagcgataaccacatttcttgcaatggcgccatggctgctgctgctgctgctgcttttccttccttcagctgtgctagtactgtcactggcaaggggggcccaccggcgcagctcggagtcaacgccggtcaacaggagccaccgccacctacctggatggacgcttacctgcagcacagtggattcatttatgagatgggcccacctgcagtgcccaggggcgcatga

SEQ ID NO: 82 - protein, 340 aa, Oryza sativa
MGDALWEMLGEEMAAAAAAAGEHGLPPGFRFHPTDEELVTFYLAAKVFNGACCGGVDIAEVDLNRCEPWELPEAARMGEKEWYFFSLRDRKYPTGLRTNRATGAGYWKATGKDREVVAAAAAGGALIGMKKTLVFYKGRAPRGEKTKWVLHEYRLDGDFAAARRSTKEEWVICRIFHKVGDQYSKLMMMKSPASYYLPVSHHHPSSIFHDLPPVPFPNPSLVPFHHDLPTSFHPPLLQHSHANSKNSSSNNGGFVFPNEPNTTNSSDNHISCNGAMAAAAAAAFPSFSCASTVTGKGGPPAQLGVNAGQQEPPPPTWMDAYLQHSGFIYEMGPPAVPRGA

SEQ ID NO: 83 - DNA, 659 bp, Oryza sativa
tttgactgatagtgacctgttcgttgcaacaaattgatgagcaatgcttttttataatgccaactttgtacaaaaaagcaggcttaaacaatggagagggcggctgcggcggcgccggtggtggtgaggcatggaggagtggtgttgccgccggggttcaggttccacccgacggacgaggagctcgtggtgcagtacctccgccgcaaggcgttcggcctgccgctccccgccgccgtcatccccgacctccacaacctcttcaagctcgatccctgggacattcctggtgcgagcagcgacggggacaagtacttcttcgccgtgcggccacctgcggcgagggggaggaggcagcatgtgacggcgagcggtgggtgctggaagccggcgggcgggcgggacaagccggtggtggtggcccggtgcggcgggagccacctcgtcggcgtcaagaagggcatggtgttcgtcccacggcaagggaggaaggcaccggcggcggcggcggcggccgccggcggtggctgctgggtcatgcacgagtacagcctcgccctgccgatgcacaagaaggtgagaaaccactactaaacccagctttcttgtacaaagttggcattataagaaagcattgcttatcaatttgttgcaacgaa

SEQ ID NO: 84 - protein, 167 aa, Oryza sativa
MERAAAAAPVVVRHGGVVLPPGFRFHPTDEELVVQYLRRKAFGLPLPAAVIPDLHNLFKLDPWDIPGASSDGDKYFFAVRPPAARGRRQHVTASGGCWKPAGGRDKPVVVARCGGSHLVGVKKGMVFVPRQGRKAPAAAAAAAGGGCWVMHEYSLALPMHKKVRNHY

SEQ ID NO: 85 - DNA, 1261 bp, Oryza sativa
tataatgccaactttgtacaaaaaagcaggcttaaacaatgggtagagtagtggtcgtcgtggcggcggcggcggtagccgtggccgtcgtcgtgctgctgggcgcggcggcgccggcggcgagcgcgatggagttcggcgacaaggacgtggcgtcggaggaggcgctgtgggagctgtacgagcggtggcgcgggcagcaccgggtggcgcgggacctcggcgagaaggcgcggcggttcaacgtgttcaaggacaacgtccgcctcatccacgagttcaaccgccgcgacgagccctacaagctccgcctcaaccgcttcggcgacatgaccgccgacgagttccgccgcgcctacgcctcctcccgcgtctcccaccaccgcatgttccgcggccgcggcgagaggcgcagcggcttcatgtacgccggcgcccgcgacctgccggcggcggtggactggcgcgagaagggcgccgtcggggcggtcaaggaccagggccagtgcggcagctgctgggcgttctcgaccatcgccgccgtggaagggatcaacgccatccgcaccagcaacctcaccgcgctgtcggagcagcagctcgtcgactgcgacaccaagaccggcaacgccggctgcgacggcggcctcatggacaacgcgttccagtacatcgccaagcacggcggcgtcgccgcctcctccgcctacccgtaccgcgcccgccagagctcctgcaagagctccgcggcgtcgtcccccgccgtcaccatcgacggctacgaggacgtgccggcgaactcggagtcggcgctgaagaaggcggtggcgaaccagccggtgtcggtggcgatcgaggcggggggctcgcacttccagttctactcggagggggtgttcgccgggaaatgcgggacggagctcgaccatggcgtggcggcggtgggctacggcacgacggtggacggcaccaagtactggatcgtcaggaactcgtggggcgcagactggggtgagaagggctacatccggatgaagcgcgacgtgtccgccaaggagggactctgcggcatcgccatggaagcatcctaccccatcaagacctcgccgaacccggcgcccaagaagatcaagaaggtcaccgacgacgacgaagatgatgatgacgaggagcaccgccaccacgacgaactctaaacccagctttcttgtacaaagttggcattataagaaagcattgcttatcaatttgttgcaacgaa

SEQ ID NO: 86 - protein, 385 aa, Oryza sativa
MGRVVVVVAAAAVAVAVVVLLGAAAPAASAMEFGDKDVASEEALWELYERWRGQHRVARDLGEKARRFNVFKDNVRLIHEFNRRDEPYKLRLNRFGDMTADEFRRAYASSRVSHHRMFRGRGERRSGFMYAGARDLPAAVDWREKGAVGAVKDQGQCGSCWAFSTIAAVEGINAIRTSNLTALSEQQLVDCDTKTGNAGCDGGLMDNAFQYIAKHGGVAASSAYPYRARQSSCKSSAASSPAVTIDGYEDVPANSESALKKAVANQPVSVAIEAGGSHFQFYSEGVFAGKCGTELDHGVAAVGYGTTVDGTKYWIVRNSWGADWGEKGYIRMKRDVSAKEGLCGIAMEASYPIKTSPNPAPKKIKKVTDDDEDDDDEEHRHHDEL

SEQ ID NO: 87 - DNA, 1494 bp, Oryza sativa
atggccatcgccgcgccgcccccgcccccgcccccgccccagcgtacggacatgccggcggcagcggacctgccaccacccccgccgccgctcgcgatcccgctcccggagaccacgcgccgcccgcgccgccgcaccagggaggtcagctccaggtacctctcctccaccaccccgggccccgtcccctcctccccgcgcctctccacctcctcgtcgcggaccccgtccccgagggcccaccgcccccgcgccgccacccctttcgccaacgagaaccacccgccgccgccgcctccgccgtccacggcgtcacgcaggcgcgccgtcctcaagctgttcgacgacggttccggcggcgccaacccgcgcgcgtcggctgcggctgcggcggggacgccgcgggccctgcaccggtcgacgagcgggccggcggcggccgcggcatccaccgcgcggagagggtacccgcgcatgccgacgcccgcgcgggccgcctcctgcccgtcgtcgtcgtccgcggcggccgcggacgacgccgcgtcctgctgctcctccgacacggggtccaccttcaccgacctctccgaggtcgacgggatcgcgctaccggccgcgccatgcgagagcccgccgctgctcggcccagcgtcctgccgtgggggccgtctctcgtcggagctccgctcgtcggtgcctgagtccggtggatcagtgagggcgttgaacccgctgtgctaccgctcgctcaattcggccctgtccggttgcccggcgccggcggggaaggcggcggtgaacgccgcgagaccaccgcagccgcatggggtgaaggcagccgaatcgaagaaggtggccatgattggagggaggaaagtccccgggaagcaggaggacgtgcaccagctcaggatgctggagaactcctacctccagtacaggttcatgaacgcccgggcagaggccgtggcaagggccaaggcttcagtggcagagaaatccctctttgggcttgaggagaggatcactgcgctgcgggtatctgtcgccgagaagaagatggaggtggagaggatgaggagggagcagacattgcgctctgttgttgatgctcaggtaccgcacttggatcaatggtgtgatcttgagggggatcattcaagctctcttatcgggttaacatcagccctgtataattcttcacttagactaccagtcattgggaatgttcgggcaaatagcgaggaaattacagaagttctcaactcttctgtacaactgctggaaccagtgtcttcttgtgttaaaaattttctaccaaaggttcaagaagttgacgatgtggctgctaagcttgcccaagttatagctagtgaaagagttgcgattgaggagtgcgggaatctcctctatcaagctcacaatttgcagatgcgagagtatagcttgaggagccaagtcatgcaactgaagcagcaagacgaaccaaaatga

SEQ ID NO: 88 - protein, 497 aa, Oryza sativa
MAIAAPPPPPPPPQRTDMPAAADLPPPPPPLAIPLPETTRRPRRRTREVSSRYLSSTTPGPVPSSPRLSTSSSRTPSPRAHRPRAATPFANENHPPPPPPPSTASRRRAVLKLFDDGSGGANPRASAAAAAGTPRALHRSTSGPAAAAASTARRGYPRMPTPARAASCPSSSSAAAADDAASCCSSDTGSTFTDLSEVDGIALPAAPCESPPLLGPASCRGGRLSSELRSSVPESGGSVRALNPLCYRSLNSALSGCPAPAGKAAVNAARPPQPHGVKAAESKKVAMIGGRKVPGKQEDVHQLRMLENSYLQYRFMNARAEAVARAKASVAEKSLFGLEERITALRVSVAEKKMEVERMRREQTLRSVVDAQVPHLDQWCDLEGDHSSSLIGLTSALYNSSLRLPVIGNVRANSEEITEVLNSSVQLLEPVSSCVKNFLPKVQEVDDVAAKLAQVIASERVAIEECGNLLYQAHNLQMREYSLRSQVMQLKQQDEPK

SEQ ID NO: 89 - DNA, 1437 bp, Oryza sativa
atggaagagagtatgacgaagcccacgacgatggccatttttctttctatagtgctactatccatggcacagcttccctctctcgtcgccggcaccggccggccaagggtcataatcatcggcgccggcatatccggtatttcagcggggaagcggctgtcggaggctgggataacggacatattgatcttagaggcaacagaccacattggcgggcggatgcacaaacagaggtttgccggcgtcaatgtggagatcggcgccaattgggtggagggcgtcaatggtgagaagatgaaccccatttggcccatcgtcaactccaccctcaagcttaggaacttcctctccgacttcgacagtcttgcccaaaacgtctacaaggacggtggcctctgcgacgcagcatacgtgcagaagagaatcgacctggctgatgaagcggataagagtggggagaatctctccgccacactgcacccaagcggccgggacgacatgtcaatcctttcaatgcaacggctcaacaatcacctgcccaacggcccgtcgtcgccggtggacatggtggtggactacttcacctacgactacgagttcgccgagccgccgcgcgtgaccagcctgcggaacaccgttcccctcccgaccttcaccgacttcggagacgacaactacttcgtcgccgaccaacggggctacgaggccgtcgtctactacctcgccggccaatacctcgaagccgacaagtccggcaacatcgttgacgctcgcctgcagctcaacaaggtggtgcgtgagatctcctactcctcgaccggcgtcaccgtgaagacggaggacaactcgacgtaccaggcagactatgtcatggtttctgcgagcttgggagtcctgcagagcgatctcatacagttcaagccacagctgccttcttggaagattcttgcgatctaccaattcgacatggccgtgtacaccaagatattcgtcaagttccccaagaaattctggcccgaaggggcagggagggagttcttcctctacgcgagcaccaggagaggctactacggagtctggcaggagtttgagaagcaatacccggatgccaatgtgctcctggtgacggtgaccgacgaggagtcgaggcggatcgagcagcagccggacagccagaccaaggcagagatcatggaggttgtgaggagcatgttccctgacgaggacgtccccgacgccaccgacatcctcgtcccgagatggtggtcggacaggttcttccaaggcagcttctccaactggcccatcggcgtcagtcgctacgaacatgaccagctcagggcgccggttgggagagtctatttcaccggtgagcacacgagcgagcgctacaatggctatgtccatggagcttatcttgcaggtatctatgcctaa

SEQ ID NO: 90 - protein, 478 aa, Oryza sativa
MEESMTKPTTMAIFLSIVLLSMAQLPSLVAGTGRPRVIIIGAGISGISAGKRLSEAGITDILILEATDHIGGRMHKQRFAGVNVEIGANWVEGVNGEKMNPIWPIVNSTLKLRNFLSDFDSLAQNVYKDGGLCDAAYVQKRIDLADEADKSGENLSATLHPSGRDDMSILSMQRLNNHLPNGPSSPVDMVVDYFTYDYEFAEPPRVTSLRNTVPLPTFTDFGDDNYFVADQRGYEAVVYYLAGQYLEADKSGNIVDARLQLNKVVREISYSSTGVTVKTEDNSTYQADYVMVSASLGVLQSDLIQFKPQLPSWKILAIYQFDMAVYTKIFVKFPKKFWPEGAGREFFLYASTRRGYYGVWQEFEKQYPDANVLLVTVTDEESRRIEQQPDSQTKAEIMEVVRSMFPDEDVPDATDILVPRWWSDRFFQGSFSNWPIGVSRYEHDQLRAPVGRVYFTGEHTSERYNGYVHGAYLAGIYA

SEQ ID NO: 91 - DNA, 873 bp, Oryza sativa
ttttgactgatagtgacctgttcgttgcaacaaattgatgagcaatgcttttttataatgccaactttgtacaaaaaagcaggcttaaacaatggtgcgggggaggacggagctgaagcggattgagaacccgacgagccggcaggtgaccttctccaagcgccggaatggcctcctcaagaaggcgttcgagctctccgtcctctgcgacgccgaggtcgccctcatcgtcttctccccccgcggccgcctctacgagttcgccagcgcccccagcctacagaaaaccatcgaccgctataaagcatacacaaaggatcatgtcaacaataagacaattcaacaagatatccagcaagtcaaagatgatactttaggcttggccaagaaacttgaagctcttgatgagtccagacggaaaatattgggagaaaatttagaaggattctctattgaagaactgcgtggtctagaaatgaaacttgagaagagcctccacaagataagactaaagaagaccgagcttctggagcagcagatagccaagctgaaagagaaggagcggactttgcttaaagacaacgaaaatttacgcggaaagcatcgcaaccttgaggctgcggcgctggtggctaaccacatgacgacgacgacggcgccggcggcgtggccgcgggacgtgcctatgacgagcagcacagccggcgccgccgacgccatggacgtggagactgatctgtacattggattgcccggcactgagcgctcctccaaccgatcggagacaggttgaacccagctttcttgtacaaagttggcattataagaaagcattgcttatcaatttgttgcaacgaacaggtcactatcagt

SEQ ID NO: 92 - protein, 233 aa, Oryza sativa
MVRGRTELKRIENPTSRQVTFSKRRNGLLKKAFELSVLCDAEVALIVFSPRGRLYEFASAPSLQKTIDRYKAYTKDHVNNKTIQQDIQQVKDDTLGLAKKLEALDESRRKILGENLEGFSIEELRGLEMKLEKSLHKIRLKKTELLEQQIAKLKEKERTLLKDNENLRGKHRNLEAAALVANHMTTTTAPAAWPRDVPMTSSTAGAADAMDVETDLYIGLPGTERSSNRSETG

SEQ ID NO: 93 - DNA, 940 bp, Oryza sativa
gtgacctgttcgttgcaacaaattgatgagcaatgcttttttataatgccaactttgtacaaaaaagcaggcttaaacaatggctggggcctctgccaaggtcgtcgcgatgctgctctccgtgctcgccacgtacggcttcgccgccggcgtcgtctacaccaacgactggctcccggccaaggccacctggtacggccagcccaacggcgccggacccgacgacaacggcggtgcgtgcgggttcaagaacaccaaccagtacccgttcatgtccatgacctcctgcggcaacgagcctctgttccaggacggcaagggctgtggcgcctgctaccagatacggtgcaccaacaacccgtcgtgctccgggcagcccaggacggtgatcatcacggacatgaactactaccccgtggccaggtaccacttcgacctgagcggcacggcgttcggcgccatggcgaggccggggctgaacgaccagctccaccacgccggcatcatcgacatccagttcaggcgcgtcccgtgctaccaccgcggcctctacgtgaacttccacgtcgaggccgggtccaacccggtgtacctcgccgtgctggtggagttcgccaacaaggacggcacggtggtgcagctcgacgtcatggagtcgctccccagcggcaagccgacgcgggtctggacgcccatgcgccgctcctggggatccatctggcgcctcgacgccaaccaccgcctccagggccccttctccctccgcatggtcagcgagtccggccagaccgtcatcgcccaccaggtcatcccggccaactggagggccaacaccaactacggctccaaagtccagttccgttgaacccagctttcttgtacaaagttggcattataagaaagcattgcttatcaatttgttgcaacgaacaggtcacta

SEQ ID NO: 94 - protein, 261 aa, Oryza sativa
MAGASAKVVAMLLSVLATYGFAAGVVYTNDWLPAKATWYGQPNGAGPDDNGGACGFKNTNQYPFMSMTSCGNEPLFQDGKGCGACYQIRCTNNPSCSGQPRTVIITDMNYYPVARYHFDLSGTAFGAMARPGLNDQLHHAGIIDIQFRRVPCYHRGLYVNFHVEAGSNPVYLAVLVEFANKDGTVVQLDVMESLPSGKPTRVWTPMRRSWGSIWRLDANHRLQGPFSLRMVSESGQTVIAHQVIPANWRANTNYGSKVQFR

SEQ ID NO: 95 - DNA, 1403 bp, Oryza sativa
tttgtacaaaaaagcaggcttaaacaatggagcaggcacgcgttggctcagccatgatcttcctactcctcgctttcctgtcagaggtttctgcatccatatcgcagcagcagcagcagcaatgcggtggtgcatcgtctgcaggagtgagagctggcttctggctgccatcctcgagccactactcgcctctcggcagcatcgacacctcgctgtacagccatctctactacagctcgctctccatcgacgagacccgctgcgccgtcgcgccgccgtcctccggtgaagagagctccattctttccaatttctcgagcagcatcaagtcctccggtgggggtttcgctgtcaagaccatcttgtccattggcacggatgagttcagggaggatgtgtccaatgccgccttctccaggatggcctcggagaagaaccttcggagagcgttcatcaactcgtcgatcgaattggctcgtgccaatggcttcgatggcctcgacttggcgtggaggtttcccgcaacgcagctggacatggagaacctcggagatcttctcgcggaatggcgagccgagatcatggaggattcgacgaccagatcgaccgagcctctcctgctgacggctactgtttacttctcgaaccacctgttcggcatggccgacactaacctcaactacccgatagacgacatgtcgagcagcctcgattgggtgaacattatcacgttcagcctgcacaagaacagcaacgtcaccacggctgacgcgcctctctacgacaaggattctcacttctcggctagctatggtgtcatctcgtggctggatgcagggctccctccatgcaagcttgtgatggggatacctctgtttggaaggtcttggttcctcagaaacaaggacaagaacgggctaggagcaccaactgcagctgctggaacaaagcagagaaagagcaaccagatcggcgtaatcgcgtacgcagagatcgaagagtacctgaagtctcagagtgtttttgttactcatgacaaccagtcagtggcagactacttctacagcggtgatctctgggtcagcttcgacagtgccgtggttgtgcaggagaaggtggagtttgtggcgaagtctcagttgcttgggtacttcctctcgaccatcagctttgatgactcaaactacacattgtccaagcaagcatcacagtcctggaatcaatatcatgtttcttcatatgcgcaaggtagttttggaattatgcaagaaggagctataatccaagatctgcatgcatcaacagggtcaccaagtagttggtattcaaaaactctcagctacttgttattgtcaataatacttgtattggaggttctataaacccagctttcttgtacaaag

SEQ ID NO: 96 - protein, 451 aa, Oryza sativa
MEQARVGSAMIFLLLAFLSEVSASISQQQQQQCGGASSAGVRAGFWLPSSSHYSPLGSIDTSLYSHLYYSSLSIDETRCAVAPPSSGEESSILSNFSSSIKSSGGGFAVKTILSIGTDEFREDVSNAAFSRMASEKNLRRAFINSSIELARANGFDGLDLAWRFPATQLDMENLGDLLAEWRAEIMEDSTTRSTEPLLLTATVYFSNHLFGMADTNLNYPIDDMSSSLDWVNIITFSLHKNSNVTTADAPLYDKDSHFSASYGVISWLDAGLPPCKLVMGIPLFGRSWFLRNKDKNGLGAPTAAAGTKQRKSNQIGVIAYAEIEEYLKSQSVFVTHDNQSVADYFYSGDLWVSFDSAVVVQEKVEFVAKSQLLGYFLSTISFDDSNYTLSKQASQSWNQYHVSSYAQGSFGIMQEGAIIQDLHASTGSPSSWYSKTLSYLLLSIILVLEVL

SEQ ID NO: 97 - DNA, 597 bp, Oryza sativa
atggcggcggcgatggggttggagaggaaggcgaaggtggcggaggtggcgctgcggtgcgcggtgtgcgccctggcggcgctggcggcggcgctggtgggcacgggaagccagacgaggaccttcttctcgctggagaagaaggccaggttcacggacatgaaggcactcgtcctcctcgtcgccgcccacggcgccgccgccgtgtacagcctgctccagctggcgcggtgcgccgcggccgcggcgtggaaaggcggcagcaatggcggcgcggcggtggtggcgtggtcggtgttctcgtgcgaccaggcggtggcgtacgcgctgatggcggcgacggcggcggcgctgcagtcgtcggtggtggggaagcgcgggcagccggagctgcagtggatgcctgtctgcggcctctacggcgcgttctgccgccgcgtcggggagggcctcgccgccgccgtcgccgcgggcctcgccgccgtgctcctcgccgccgtctccgcgttcaacctgttccgcctctacggcggcggcggcggcggccgcaagagcagcgccggcgccgtctccggcaatggcgcgaacacgtggtag

SEQ ID NO: 98 - protein, 198 aa, Oryza sativa
MAAAMGLERKAKVAEVALRCAVCALAALAAALVGTGSQTRTFFSLEKKARFTDMKALVLLVAAHGAAAVYSLLQLARCAAAAAWKGGSNGGAAVVAWSVFSCDQAVAYALMAATAAALQSSVVGKRGQPELQWMPVCGLYGAFCRRVGEGLAAAVAAGLAAVLLAAVSAFNLFRLYGGGGGGRKSSAGAVSGNGANTW

SEQ ID NO: 99 - DNA, 425 bp, Oryza sativa
tttgtacaaaaaagcaggcttaaacaatgagccgggggcggtcgccggagccgctggatttcttcatctggacagtcgaggatgttggattatggcttgaagagataaaccttggcagctacaggcaagtttttgaggaaaacggtgtcaatggagagtatcttgaaagcctgtcgatgtttactacagaacagattctgcggtttatcaggaggtgccatatgaaatggggagatttcattacattgtgcaaagagttgaggcgcatcaaagtggcctgcctgaaaggggagcaagaagtccgcaggccatggtgggcgccgtcatgcctatcggtggtgttcgtgagggcggccaagcggaaccggcagtcccgagtcgtctccctgaagctggagccctagacccagctttcttgtacaaag

SEQ ID NO: 100 - protein, 125 aa, Oryza sativa
MSRGRSPEPLDFFIWTVEDVGLWLEEINLGSYRQVFEENGVNGEYLESLSMFTTEQILRFIRRCHMKWGDFITLCKELRRIKVACLKGEQEVRRPWWAPSCLSVVFVRAAKRNRQSRVVSLKLEP

SEQ ID NO: 101 - DNA, 1940 bp, Oryza sativa
taatgattttattttgactgatagtgacctgttcgttgcaacaaattgatgagcaatgcttttttataatgccaactttgtacaaaaaagcaggcttaaacaatgggaagtgcttgctctaggaagagaggccagctgcttgttgatgaggaagatctctacagtgcaaggttctccaagagcagcagcttcaagtggctactgcacaccttgccccgcagcggctctgatgtacacaggaaggtgcagggaccagtgcctgtgcggtgcccatcgctaatggagctctgtgtggccaaagtccgcgaggatattgggaagtattctgatttctcgctgctgcctagagatcttagtcagcaggtatttaatgaactggtggagtggaacattctcactgaagagttgcttggagcttttcgtgattgtgcattgcaggacatctgtttggcagactaccctggggtgagggatgcttggatggaagtagcggcttctcaagggcaatcattgttatctgttgatatctcttgctctgatgtgactgatggtggactgaatcaactcaaggattgcatcaacttgcaaagtttgtcatgcaattactgtgatcagatatcggagcatggacttaaaacattgtcaggcctctcaaatgtgacatccctgagctttaaaaaatgttctgctgttactgctgaaggagctaaagcctttgcaaacatggttaatttgggtagcttggaccttgagcgatgtccgaagattcatggtggacttgttcatttaaaaggcttgagaaaactggaaaagctaaatttgaggtattgtaatggcatcacagattctgatatgaaacatttatcagatcttacaaatttgagagagcttcaactttcttgctgcaaaataagtgatcttggtgtttcttatctaagaggtctatcgaagctagctcacctaaacctggagggctgtgcagtaactgctgcttgtttggaggttatttcaggattggcttcattggtattgttgaatcttagtagatgtggagtatatgacgaaggctgtgagcatttggaaggtcttgtcaagttgaaggttctcaatttagggttcaactatattacagatgcctgcttggttcatctaaaagaactgatcaatttggagtgtttgaacttggactcatgcaagattggtgacgaggggctagcacatttgaaaggacttctgaaactaagaagcttggaactttcagacacagaagttgggagcaatggacttcgtcatctctctggcctacggaatttgcagagcatcaatctctcttttacattggttacggacattggcttgaagaaaatttctggcctgaattcactcagatcccttaatcttgataatcgccaaatcacagataatggtttggcagctcttacatgtctcactgggttgacacaccttgatctatttggagctcgtataactgatgctgggacaaactgcttgaaatatttcaagaatctacagtcccttgaggtctgcggtgggttaattacagatgctggagtgaagaatatcaaagacctcaaagctctgacgctgcttaacctatctcaaaatggcaacctcactgacaaatccttagagctgatttcccgcctcactgccttggtctccctgaacgtgtcgaactctcgggtgtcgaattctgggctccaccatctgaagccactccagaacctgaggtccttgtctctggagtcctgcaaggtgaccgcgattgagatcaagaagctccagttggctgccctgcccaatctcgtcagtgtgcggcccgagtaaacccagctttcttgtacaaagttggcattataagaaagcattgcttatcaatttgttgcaacgaacaggtcactatcagtcaaaataaaatc

SEQ ID NO: 102 - protein, 581 aa, Oryza sativa
MGSACSRKRGQLLVDEEDLYSARFSKSSSFKWLLHTLPRSGSDVHRKVQGPVPVRCPSLMELCVAKVREDIGKYSDFSLLPRDLSQQVFNELVEWNILTEELLGAFRDCALQDICLADYPGVRDAWMEVAASQGQSLLSVDISCSDVTDGGLNQLKDCINLQSLSCNYCDQISEHGLKTLSGLSNVTSLSFKKCSAVTAEGAKAFANMVNLGSLDLERCPKIHGGLVHLKGLRKLEKLNLRYCNGITDSDMKHLSDLTNLRELQLSCCKISDLGVSYLRGLSKLAHLNLEGCAVTAACLEVISGLASLVLLNLSRCGVYDEGCEHLEGLVKLKVLNLGFNYITDACLVHLKELINLECLNLDSCKIGDEGLAHLKGLLKLRSLELSDTEVGSNGLRHLSGLRNLQSINLSFTLVTDIGLKKISGLNSLRSLNLDNRQITDNGLAALTCLTGLTHLDLFGARITDAGTNCLKYFKNLQSLEVCGGLITDAGVKNIKDLKALTLLNLSQNGNLTDKSLELISRLTALVSLNVSNSRVSNSGLHHLKPLQNLRSLSLESCKVTAIEIKKLQLAALPNLVSVRPE

SEQ ID NO: 103 - DNA, 476 bp, Oryza sativa
gccccaaataatgattttattttgactgatagtgacctgttcgttgcaacaaattgatgagcaatgcttttttataatgccaactttgtacaaaaaagcaggcttaaacaatggcgggtgcagcgaaggcgtcttggatggtggcgatgagcgtgggcgcagtggaggcgctcaaggaccagggcggactctgccgctggaactacgcgctgcggtccatccacaaggcggccaaggccaacgccgccggcgtctcgcagggcaagaagctgcctgcctccgcggcggcggtagcggagaggaggagagcggagaaggccgaggaggggttgaggacggtcatgtacatcagctgctggagcaccaattagtatagacccagctttcttgtacaaagttggcattataagaaagcattgcttatcaatttgttgcaacgaacaggtcactatcagtcaaaataaaatcattatttg

SEQ ID NO: 104 - protein, 89 aa, Oryza sativa
MAGAAKASWMVAMSVGAVEALKDQAGLCRWNYALRSIHRAAKANARAGVSRGKKLPASAAAVAERRRAEKAEEGVEDGHVHQLLEHQLV

SEQ ID NO: 105 - DNA, 1957 bp, Oryza sativa
ccggccgttgcttcacaacgttcaaatccgctcccggcggatttgtcctactcaggagagcgttcaccgacaaacaacagataaaacgaaaggcccagtcttccgactgagcctttcgttttatttgatgcctggcagttccctactctcgcgttaacgctagcatggatgttttcccagtcacgacgttgtaaaacgacggccagtcttaagctcgggccccaaataatgattttattttgactgatagtgacctgttcgttgcaacaaattgatgagcaatgcttttttataatgccaactttgtacaaaaaagcaggcttaaacaatggagagtagagggaagatactaatggagaggtatgagttgggcagattgttggggaaaggaacatttggcaaggtgcactatgcaaggaatctggagtcaaaccagagtgtggccataaagatgatggacaaacagcaggtgttgaaggtcgggctttcggagcagatcagacgtgagatcacaaccatgcggttggtggctcataagaacattgttcagcttcatgaggtcatggcaacacggaacaagatctactttgtgatggagtatgtgaaaggtggtgagctatttgaaaaggttgcaaagcgtggaaagcttacagaggttgttgcacataagtacttccagcaactcattagtgcagtggattactgccacagtcgaggtgtgtatcaccgggacttgaagcctgaaaacctgctgttggatgagaatgagaacctgaaagtctcagactttggactgagtgcgctttcagagtcgaagaggcaagatggcttactccataccacctgtggaacacctgcatatgtagctccagaggtgatcagcaagataggatatgatggtgcaaagtcagatatttggtcttgtggtgttatcctgtttgttcttgttgctggttaccttcctttccagggcccaaacttgatggaaatgtatcggaagatacaacatggtgaattcaggtgccccggttggttttcacgcaaacttcagaagttgttgtacaagatcatggaccccaacccaagcacaaggatttcaatccagaagataaaggagtctacctggttccggaaaggtcctgaggagaatcgtattttgaaggaaagaactttgaatgaaaacaccaccaaaaatgttgctctggtgcttggtgtgagacgcaagaaaaatgctcatgaagatgtgaagcccatgtcagtgacaaacttaaatgcctttgaaattatctctttctccaaggggtttgatctctctggcatgttcattgtaaaggaatggagaaatgaggcaaggttcacttcagataaatctgcctcaaccataatctcaaagctagaagatgtagcaaaggcgctaaatctcagggtaaggaagaaagacaatggtgtagtgaagatgcaagggaggaaggagggaaggaatggtgttcttcagtttgacatagagatatttgaggttaccacttcctatcatatcatcgagatgaaacaaacaagtggcgattcattggagtaccgacagctactggaggagggcatccggccagctctgaaggacattgtcttggcctgacatggagatgaatagacccagctttcttgtacaaagttggcattataagaaagcattgcttatcaatttgttgcaacgaacaggtcactatcagtcaaaataaaatcattatttgccatccagctgatatcccctatagtgagtcgtattacatggtcatagctgtttcctggcagctctggcccgtgtctcaaaatctctgatgttacattgcacaagataaaaatatatcatcatgatcagtcctgctcctcggccacgaagtgcacgcagttgccggccgggtcgcgcagggcgaactcccgcccccacggctgctcgccg

SEQ ID NO: 106 - protein, 438 aa, Oryza sativa
MESRGKILMERYELGRLLGKGTFGKVHYARNLESNQSVAIKMMDKQQVLKVGLSEQIRREITTMRLVAHKNIVQLHEVMATRNKIYFVMEYVKGGELFEKVAKRGKLTEVVAHKYFQQLISAVDYCHSRGVYHRDLKPENLLLDENENLKVSDFGLSALSESKRQDGLLHTTCGTPAYVAPEVISKIGYDGAKSDIWSCGVILFVLVAGYLPFQGPNLMEMYRKIQHGEFRCPGWFSRKLQKLLYKIMDPNPSTRISIQKIKESTWFRKGPEENRILKERTLNENTTKNVALVLGVRRKKNAHEDVKPMSVTNLNAFEIISFSKGFDLSGMFIVKEWRNEARFTSDKSASTIISKLEDVAKALNLRVRKKDNGVVKMQGRKEGRNGVLQFDIEIFEVTTSYHIIEMKQTSGDSLEYRQLLEEGIRPALKDIVLAHGDE

SEQ ID NO: 107 - DNA, 872 bp, Oryza sativa
gccccaaataatgattttattttgactgatagtgacctgttcgttgcaacaaattgatgagcaatgcttttttataatgccaactttgtacaaaaaagcaggcttaaacaatggcggcagtcggcgcgcacgcagcggtctaccaccacccggtctcgggcctctcggcgccggcgggcgacgccgcctactcgatgtcatcgtacttctcccacgggggaagctcgacctccagctccgcgtccagcttctccgccgccctcgccgccgcaacgacgccgccgcttcccgacccgtcggggtcgcagttcgacatctccgagttcttcttcgacgacgcgcctccggccgccgtgttcaatggcgcgcccaccgccgcgctgccggatggcgccgccgcaaacgcaacaaggagcgcggcggaggcggtgccggcgccggcgccggcggccgtggagaggccgcggacggagcggatcgcgttccggacgaagtcagagatcgagattcttgacgacggctacaagtggcgcaagtacggcaagaagtccgtcaagaacagccccaacccaaggaactactaccggtgctcgacggaagggtgcaacgtgaagaagagggtggagcgggacaaggacgacccgagctacgtggtgacgacgtacgaggggacgcacaaccacgtgagccccagcacggtgtactacgccagccaggacgccgcctccggccgcttcttcgtcgccggcacgcagccgccaggttctctcaattaaacccagctttcttgtacaaagttggcattataagaaagcattgcttatcaatttgtgcaacgaacaggtcagtatcagtcaaaataaaatcattat

SEQ ID NO: 108 - protein, 221 aa, Oryza sativa
MAAVGAHAAVYHHPVSGLSAPAGDAAYSMSSYFSHGGSSTSSSASSFSAALAAATTPPLPDPSGSQFDISEFFFDDAPPAAVFNGAPTAALPDGAAANATRSAAEAVPAPAPAAVERPRTERIAFRTKSEIEILDDGYKWRKYGKKSVKNSPNPRNYYRCSTEGCNVKKRVERDKDDPSYVVTTYEGTHNHVSPSTVYYASQDAASGRFFVAGTQPPGSLN

SEQ ID NO: 109 - DNA, 722 bp, Zea mays
tgacctgttcgttgcaacaaattgatgagcaatgcttttttataatgccaactttgtacaaaaaagcaggcttaaacaatggtaaagaacttattgcagtactatatctttgtctacgtggatgcaccagcttatcaaatcttgaagaacctaaatatcatcagcacaggtgttttgtaccgcatcattttgaagaaaaatttcccccctgtcccttttaggctaagtgaaattcagtgggcagcatttgttcttctatgtgctggttgcacaacagctcaacttaatccttcgtctgaccatgtgcttcaaactcctattcaaggttggatgatggcaattgtgatggctcttttgagtggttttgctggggtgtatacagaagctatcattaaaaaacggccatcaagaaacatcaacgtgcagaacttttggctatacatatttggggtgatcttcaatctagttgcaatttgtgttcaggattatgatgcagtcatgaataaaggctttttccatgggtattcattcatcacagttttgatgattctgaaccacgcactgagtggaattgctgtttcaatggtgatgaaatatgctgataacatagtcaaggcatgtggcactagcatgtaaacccagctttcttgtacaaagttggcattataagaaagcattgcttatcaatttgttgcaacgaacaggtcactatcagtcaaaat

SEQ ID NO: 110 - protein, 185 aa, Zea mays
MVKNLLQYYIFVYVDAPAYQILKNLNIISTGVLYRIILKKNFPPVPFRLSEIQWAAFVLLCAGCTTAQLNPSSDHVLQTPIQGWMMAIVMALLSGFAGVYTEAIIKKRPSRNINVQNFWLYIFGVIFNLVAICVQDYDAVMNKGFFHGYSFITVLMILNHALSGIAVSMVMKYADNIVKACGTSM

SEQ ID NO: 111 - DNA, 819 bp, Zea mays
atgctgagggtcgcgggcaggcgcctctcgtccgctctcgcctggcgccccgccgccgccgcctcaggctcccggggccctctcgccggtacactacccggccgcgacgacgacgacacacgcgactgcagggcgcgtttcgccatcgaatctcccttcttcgccgctgccagagggttttcagcagagactcttgctccaagaaaccaggatgtgggcttatctgagctcccagcaactgtggcagctgtgaagaatccaagtggaaaaatcgtgtatgatgagtataaccatgagcgctacccacctggagaccccagcaagcgtgcatttgcctactttgtgctgagtggtgggaggttcatttacgcatctttgctgcgacttctcgtcttaaaatttgtcctaagcatgtcagcaagtaaggatgttctcgcgcttgcctcacttgaggttgacctctcaagcattgagcctggaaccacggtgacggtgaagtggcgtggcaagccggtcttcataaggcggaggacagaggatgatatcaagttggccaacagtgttgacgtcgcatccctccgccacccagagcaagatgcagagcgcgtcaagaaccccgaatggctggtcgtcattggggtctgcactcacctgggctgcatcccgctccctaatgcaggagactttggtggctggttctgcccgtgccacggctcgcactacgacatttctggtaggatccgcaagggcccggcacccttcaacctggaagtgccgacatacagcttcttggaagagaacaagcttctcatcggctga

SEQ ID NO: 112 - protein, 272 aa, Zea mays
MLRVAGRRLSSALAWRPAAAASGSRGPLAGTLPGRDDDDTRDCRARFAIESPFFAAARGFSAETLAPRNQDVGLSELPATVAAVKNPSGKIVYDEYNHERYPPGDPSKRAFAYFVLSGGRFIYASLLRLLVLKFVLSMSASKDVLALASLEVDLSSIEPGTTVTVKWRGKPVFIRRRTEDDIKLANSVDVASLRHPEQDAERVKNPEWLVVIGVCTHLGCIPLPNAGDFGGWFCPCHGSHYDISGRIRKGPAPFNLEVPTYSFLEENKLLIG

SEQ ID NO: 113 - DNA, 1549 bp, Zea mays
caaacaacagataaaacgaaaggcccagtcttccgactgagcctttcgttttatttgatgcctggcagttccctactctcgcgttaacgctagcatggatgttttcccagtcacgacgttgtaaaacgacggccagtcttaagctcgggccccaaataatgattttattttgactgatagtgacctgttcgttgcaacaaattgatgagcaatgcttttttataatgccaactttgtacaaaaaagcaggcttaaacaatggcgaaccgcagtgttgccatgggcttggccctcgcgttcgtggccatgaccgcgctctgttgcgcgccgggcgccgcggagttgccccggctggaccacccggccaggagcgacggatcgctgaagctgctcgtcgtcggggactggggacgcaaggggactcacaaccagtcccgggtcgccgaccagatgggaagggtcggggagaagctcgatatcgactttgttatatccaccggggacaacttctacaagaacggcctcaagggcgtgcgcgaccaggcatttgaagaatcgttcgtggatatctacacagctcaaagcttacagaagccatggtactcagttctaggaaatcatgattacaggggcaatgcgctcgcacagcttagcccagtcttgaggaagatcgacgaccgattcatttgcatgagatcgttcatcgttaacgcagaacttgtggacttcttctttgtcgacaccactccgttccaactggagtattggactcaccctggcaagcatcgttatgactggagaggggtggcgcctcgaggcaattacttagccaatttgctgaaggatctggatgtggctatgaagaaatcaactgcaaggtggaagattgtggttgggcatcacaccatgaggagtgtgagtgagcacagggacaccgaggagcttctggaattactacttccagtcctcaaggacaatggcgtcgacttctacatcaatggacacgatcactgtctggagcacattagcagcagagacagtccactccagtatttcacgagcggaggcggttccaaggcatggagaggagtcttccatccaaacaaggacaagctccgattcttctacgacgggcaagggttcatgtccctccagctgaaccaagaccaggctcactttatcttttacgacgttttcgggaacatactgtaccgatggagctcgagacatccccagtcttccacgtatctcgatgaggaataaacccagctttcttgtacaaagttggcattataagaaagcattgcttatcaatttgttgcaacgaacaggtcactatcagtcaaaataaaatcattatttgccatccagctgatatcccctatagtgagtcgtattacatggtcatagctgtttcctggcagctctggcccgtgtctcaaaatctctgatgttacattgcacaagataaaaatatatcatcatgatcagtcctgctcctcggccacgaagtgcacgcagttgccggccgggtcgcgcagggcgaact

SEQ ID NO: 114 - protein, 334 aa, Zea mays
MANRSVAMGLALAFVAMTALCCAPGAAELPRLDHPARSDGSLKLLVVGDWGRKGTHNQSRVADQMGRVGEKLDIDFVISTGDNFYKNGLKGVRDQAFEESFVDIYTAQSLQKPWYSVLGNHDYRGNALAQLSPVLRKIDDRFICMRSFIVNAELVDFFFVDTTPFQLEYWTHPGKHRYDWRGVAPRGNYLANLLKDLDVAMKKSTARWKIVVGHHTMRSVSEHRDTEELLELLLPVLKDNGVDFYINGHDHCLEHISSRDSPLQYFTSGGGSKAWRGVFHPNKDKLRFFYDGQGFMSLQLNQDQAHFIFYDVFGNILYRWSSRHPQSSTYLDEE

SEQ ID NO: 115 - DNA, 1191 bp, Zea mays
atggggaaggcggggcgctggctccggagcttcctgtcgggcaagaaggacaggcaggcggcgcctcccaaggacaagcggtggagcttcaggcgccccccgccggcggcgcaggaagggacggcggcggaccagcaccaccatgggccgccgctcggtctgccggcgccgggcgtcgacgagctcgacttcgaccagaagaagcacgccgtggcggtggccgtggcgaccgcggcagcggccgacgcggcggtggccgccgcgcacgccgccgccgcggtggcgcgcctgtcctcccgcgccgcgccgcgcttcgcaccgccgccgtgcctcgtcgaggacgccgcggccgtcaggatccaggccaccttcagaggctatctggcgcggacggctctgtgcgcgctgaggggcatcgtgaagctgcaggctctggtgcgggggcagctggtgaggaggcaggccaacgccacgctccgctgcatgcaggcgctcctggcggcgcagtcccagctgcgggcacagcgcatgctggccctccagctccacgaccaccaccacccgacgcctcccagaccacgccagtcgccgcagcacccgaggcaccgccgctcctacgagatggaccggtcgtgcgaggacaacgccaagatcgtggaggtggacgtgggcgagcccgtgcggcggggcgcggcggggaaggacaggcagctctacgccggcggccggtcctccccggcgccgtcgctggcggcgacggagctgctgagcccgcgggcgtacagcgcccacttcgacgacctctcggtggccaacacggcgcagagcagcccgcggcaggcgccggaggcctgctgcccgggctacatggccaacacggagtcgtcccgcgccaaggcgcggtcccagagcgcgccccgccagcgcaccgacgcgctggagcggctgcccagccgcaggaagcaggggacgccgcccagggccgccgccaggatgcacttgcagcgctcgtcgtcgctggccggcaactactcctccccgtggtcgtcgtcggctgccaggctcgacgtctccgccgcgtcgctcaaggacagcgagtgcggctccaccagctccgtgctcaccgccgccaccctctacagccggacgcggtcgctcgtcggctccgaggtgcgccgtggcctgtactga

SEQ ID NO: 116 - protein, 396 aa, Zea mays
MGKAGRWLRSFLSGKKDRQAAPPKDKRWSFRRPPPAAQEGTAADQHHHGPPLGLPAPGVDELDFDQKKHAVAVAVATAAAADAAVAAAHAAAAVARLSSRAAPRFAPPPCLVEDAAAVRIQATFRGYLARTALCALRGIVKLQALVRGQLVRRQANATLRCMQALLAAQSQLRAQRMLALQLHDHHHPTPPRPRQSPQHPRHRRSYEMDRSCEDNAKIVEVDVGEPVRRGAAGKDRQLYAGGRSSPAPSLAATELLSPRAYSAHFDDLSVANTAQSSPRQAPEACCPGYMANTESSRAKARSQSAPRQRTDALERLPSRRKQGTPPRAAARMHLQRSSSLAGNYSSPWSSSAARLDVSAASLKDSECGSTSSVLTAATLYSRTRSLVGSEVRRGLY

SEQ ID NO: 117 - DNA, 2721 bp, Zea mays
atgccgctcaggttggagatcaagcggaagttcgctcaacggtcggagagagtcaagtccgtggacttgcaccccacggagccatggatcctgtcgagcctgtactcggggagtgtctgcatctgggattatcaggcacaggcaatggtgaaatcatttgaagtttcagaactgccagtgaggtcggcaaagtttatttcaaggaaacaatgggttgtagctggtgcagacgacatgttcattcgtgtctacaactacaataccatggacaaagttaaagtttttgaggctcatactgattacatcagatgtgttgcggtccatccaactctaccatatgtgctgtcatcatctgatgacatgctaataaaactgtgggactgggataaagggtgggtgtgcactcaaatatttgagggacattcacactatgtgatgcaggttactttcaatccaaaggatattaacacctttgcaagtgcatcccttgaccgcactacaaagatatggagtttgggttctccagatccaaacttcacacttgatgggcatcaaaagggtgtcaactgtgttgactacttcactggtggtgacaggccctatttgattactggttctgatgactccaccgcaaaggtctgggattaccagacgaagagctgtgttcagacacttgaagggcatacacataatatttctgctgtttgtttccatcctgagctccctataatcattactggatctgaagatggtacagttcgtatatggcattcgacaacttacagacttgagaacacactaaactatggccttgagagagtctgggctgttggatacatgaaggggtctagaaggatggtgattggttatgatgaggggaccattatgataaaaatgggccgtgaagtacccatagcaagtatggataccggtgggaaaatcatttgggcgaaacataatgaaatacaaactgtaaatatcaagacagtcggtgcaggttttgaagccacagatggagaaagattacccttggctgtaaaagagttaggaagctgtgatttgtacccacagagcttgaagcataaccctaatggacggttcgttgttgtatgtggagatggcgagtacataatttatactgccctggcctggaggaatagatcatttgggtctgcactggaatttgtttggtcatcagaaggagaatatgcaattagggaaagtacatcaagaataaagattttcaataaatcgtttcaggagaagaaaactatccgcccttcattttcagcagagcgtatttatggtggggtattgttggcaatgtgttctagtgacttcatctgcttttatgactgggctgattgtagactaatacgccgaatcgatgtgaatgttaagaatgtttactgggctgatagtggtgacctagttgcaatagcaagtgatacatcattctacatcctcaagtacaatagagatattgttgcttcttatctagaaggtggaaagcctgtggacgaagaaggcgttgaagatgcttttgagctgcttcatgagatcaatgagcgagtgagaactggaatttgggttggagactgctttatctataacaactcatcgtggcgcctaaattattgtgttggtggtgaggtcactacaatgtatcatttggatcgccctatgtacttgttgggatatattgcgaaccaaagtcgagtttatcttattgacaaggagttgaatgtcattgggtacacattacttctgagtttgattgagtacaagacccttgtgatgcgtggggatttggatcatgcaaacaaaattttatcatccatacctaaggcgcaatataatagtgttgctcattttttggaatcgagaggtatgttggaagaggctcttgagatagccactgatgctgactacaagtttgacctagctgtgcagcttggaaaattagaagtcgcgaaggctatcgccatagaagcacaaagtgaatctaaatggaagcagttgggcgaacttgccatgtccacaggcaagctagagatggcagaggaatgccttcttcaagcaaaggacttaagtggcttgttgctactgtactcatctcttggagatgctgaaggaattgaaaagcttgcttctttggcaaaagaacacggaaaaaacaatgttgctttcctctgcctttttatgcttggtaaagttgaagattgcatacagttgcttgtagacagtaaccgtatacctgaagctgcattactggcgcgttcatatcttcctagcaaagtaccagagatagtggcaatttggagagacgacctgagtaaaattaatccaaaagctgcagagtctctagcagatccttctgaatatccaaatctatttgaagactggcaggttgctctaactgtagaaaaaagtgttgcgtctcagaggggcaattatcttcctgctgaccagtacttgaatcatgctgagaagtcagacatgactattgtggaagctttcaaaaggatgcaggttgttcagcatgaggaacctgaagatgtggctgaggaaaatggagaacttgatcaacaggcatttgaagagactgaaatgcagaatacagatgatgatgctgatgaacctgaagagacagttttagtaaatgggaacaagggtgaggaacatcagggtacggacaatgaaggagctttatctgcctag

SEQ ID NO: 118 - protein, 906 aa, Zea mays
MPLRLEIKRKFAQRSERVKSVDLHPTEPWILSSLYSGSVCIWDYQAQAMVKSFEVSELPVRSAKFISRKQWVVAGADDMFIRVYNYNTMDKVKVFEAHTDYIRCVAVHPTLPYVLSSSDDMLIKLWDWDKGWVCTQIFEGHSHYVMQVTFNPKDINTFASASLDRTTKIWSLGSPDPNFTLDGHQKGVNCVDYFTGGDRPYLITGSDDSTAKVWDYQTKSCVQTLEGHTHNISAVCFHPELPIIITGSEDGTVRIWHSTTYRLENTLNYGLERVWAVGYMKGSRRMVIGYDEGTIMIKMGREVPIASMDTGGKIIWAKHNEIQTVNIKTVGAGFEATDGERLPLAVKELGSCDLYPQSLKHNPNGRFVVVCGDGEYIIYTALAWRNRSFGSALEFVWSSEGEYAIRESTSRIKIFNKSFQEKKTIRPSFSAERIYGGVLLAMCSSDFICFYDWADCRLIRRIDVNVKNVYWADSGDLVAIASDTSFYILKYNRDIVASYLEGGKPVDEEGVEDAFELLHEINERVRTGIWVGDCFIYNNSSWRLNYCVGGEVTTMYHLDRPMYLLGYIANQSRVYLIDKELNVIGYTLLLSLIEYKTLVMRGDLDHANKILSSIPKAQYNSVAHFLESRGMLEEALEIATDADYKFDLAVQLGKLEVAKAIAIEAQSESKWKQLGELAMSTGKLEMAEECLLQAKDLSGLLLLYSSLGDAEGIEKLASLAKEHGKNNVAFLCLFMLGKVEDCIQLLVDSNRIPEAALLARSYLPSKVPEIVAIWRDDLSKINPKAAESLADPSEYPNLFEDWQVALTVEKSVASQRGNYLPADQYLNHAEKSDMTIVEAFKRMQVVQHEEPEDVAEENGELDQQAFEETEMQNTDDDADEPEETVLVNGNKGEEHQGTDNEGALSA

SEQ ID NO: 119 - DNA, 1646 bp, Zea mays
attttattttgactgatagtgacctgttcgttgcaacaaattgatgagcaatgcttttttataatgccaactttgtacaaaaaagcaggcttaaacaatgatgcagcaggagccctggaacgccgccgccgccatggggctcctccgcccgaccaagtcggcgccctgctcgcccatcaagccgccgccggcgaccatgctgcggactcacttccacgtcgcgcacaaggtgccggtcggcgacacgccctacgtgcgagccaagcgcgtccagctggtggacaaggatccggagaaggcgatcgcgctgttctggagtgcgatcaacgccggagaccgcgttgacagcgcgctcaaggacatggccatcgtgatgaagcagcagaaccgcgccgaggaggccatcgaggccatcaagtcgctgcgcagccgatgctccgaccaggcgcaggagtccctcgacaacatcctcctcgatctctacaagagatgcgggcggctggacgaccaaatctcgctgctcaagcacaagctgcagctgatcaaccagggccacgccttcaacggcaagcggaccaaaacggctcgctctcagggccgcaagttccaggtcaccctggagcaagaagccaccaggctccttggtaacctggggtgggcgctgatgcagaaggagaactacacggaagcggagggagcgtaccgtcgggcgctgctcatcgggccggacaacaacaagatgtgcaatctgggcatctgccttatgaagcaggcccgcgtgctcgaggccaaggatgtgctcaagcaggtacgccccgcggcggttgatggtctgcgcggcgccgactctcacctcaaggcctgcgagcgagcgcaggagatgctgcgggacctcgagaccaagctcatcggccgcccgcccgctgaccagctcgacacgaactggctcttcgatgcgctgctgctgggatcgtcctcaagcatctggcagccgcagccgtgcaccgatcacttgctgccacctcctgttccggctccagccacggcgccgcgcggccacttcgccgatgaaaacgccggtgtgagcaagaagctggcggtgctccaggagaacatgcttaatgtggacgcgcagcccttctactctttgcgggtgccgtcgcttgcagccaagtcacataacacgctgcctcagcggcaacagcagcagaagccagctcctgtccatgatcccctgggcaacctgaagagaacacggtccggcaattgcatggacaaggcaggagcagtggtgttcaaggagcagagcatcgacgagaacagcggcaggaggaagtcgctgtcagctgaggacaggtggccagagctacccgaccacagcgcgttcggtgaggccctcgtcgccgtcgtcctggctccagtgctcgacgacgaaccaacagctactgaagtcaagctgccggcgagctgcgacacgagcccagcggtgaaggaaaagatcggcaagaggctgaggatcttccaggacatcacacagacagtgaacagtttctgaacccagctttcttgtacaaagttggcattataagaaagcattgcttatcaatttgttgcaacgaacaggtcactatcagtcaaaataaaat

SEQ ID NO: 120 - protein, 485 aa, Zea mays
MMQQEPWNAAAAMGLLRPTKSAPCSPIKPPPATMLRTHFHVAHKVPVGDTPYVRAKRVQLVDKDPEKAIALFWSAINAGDRVDSALKDMAIVMKQQNRAEEAIEAIKSLRSRCSDQAQESLDNILLDLYKRCGRLDDQISLLKHKLQLINQGHAFNGKRTKTARSQGRKFQVTLEQEATRLLGNLGWALMQKENYTEAEGAYRRALLIGPDNNKMCNLGICLMKQARVLEAKDVLKQVRPAAVDGLRGADSHLKACERAQEMLRDLETKLIGRPPADQLDTNWLFDALLLGSSSSIWQPQPCTDHLLPPPVPAPATAPRGHFADENAGVSKKLAVLQENMLNVDAQPFYSLRVPSLAAKSHNTLPQRQQQQKPAPVHDPLGNLKRTRSGNCMDKAGAVVFKEQSIDENSGRRKSLSAEDRWPELPDHSAFGEALVAVVLAPVLDDEPTATEVKLPASCDTSPAVKEKIGKRLRIFQDITQTVNSF

SEQ ID NO: 121 - DNA, 768 bp, Zea mays
gttgcaacaaattgatgagcaatgcttttttataatgccaactttgtacaaaaaagcaggcttaaacaatgggctgcgcgacgtccaagcagttcagcaggagcgcgccggcgcacgcggatccggccgtgctggcgacccagacctcattcacggtgaacgaggtggaggcgctgtacgagctgtacaagaagctgagctgctccatcgtcaaagacgggctcatccacaaggaggagttccagctcgccttgttcaggaacagcaggagagcgaacctctttgcagacagggtcttcgatctgttcgatctcaagcggaacggagtcatcgatttcgaggagttcgtgcggtcgctcagtgtgttccaccctaaagcagatacgtcggagaagacggcgttcgctttcaagctgtatgatctgagggggacaggctacatcgagaaagaagagctcagagagatggtcttggcgttgcttgatgagtccgacctctgcctttcagacagcaccgtcgagacgatcgttgataacacgttcagccaagcggactcgaacggggatggcaggatagatcctgaagaatgggaggagttcgtgaagaagaatccggcaacgttaaggaacatgactctcccctatctgcaggacatcaccatgtcatttccgagcttcataatgcgttcagaagccagtgactgaacccagctttcttgtacaaagttggcattataagaaagcattgcttatcaatttgttgcaacga

SEQ ID NO: 122 - protein, 211 aa, Zea mays
MGCATSKQFSRSAPAHADPAVLATQTSFTVNEVEALYELYKKLSCSIVKDGLIHKEEFQLALFRNSRRANLFADRVFDLFDLKRNGVIDFEEFVRSLSVFHPKADTSEKTAFAFKLYDLRGTGYIEKEELREMVLALLDESDLCLSDSTVETIVDNTFSQADSNGDGRIDPEEWEEFVKKNPATLRNMTLPYLQDITMSFPSFIMRSEASD

SEQ ID NO: 123 - DNA, 1944 bp, Zea mays
atggcgggtgcgacgtccctggcggcggccgctaatctggcgggcaagtcgagcgtgcgggtcgtcgtgatcggcgaccccggcaccggcaagtccagcctcatcgtcgccctcgccaccgagcagttccccgagaacgtaccacgcgtcatgccccccacccgcctccccgccgactacttccccgatcgcgtccccatcactatcatcgacacgtcgtccagcccggagcagaagccgaagttgatcgccgagtgccaggcagccgatgcggtcgtgctcacctacgcctgcgaccggcccgccacactggagcggctcagttcgttctggcttcccgagctccggcgacttcagttgaaggctccagttatcgtggtggggtgcaagctggacctgagggacgaacagcaggttagccttgaacaggttatggcgcccatcatgcagtccttccgcgagattgagacatgcattgagtgctccgctcttcggcagatccaggtgcctgaggtcttctattatgcccagaaggcagtacttcacccaactgctccgctcttcgatcaagagttacaagctctgaagcctcgatgtgtgagagcgttgaagcggatatttattatatgtgataatgacaaggatggtgctctcagtgatgtggagctcaatgaattccaggtccgatgctttaatgctccactccagcctactgaaatttcaggagttaagagagttgttcaggagaagatgcctgaaggcgtaaatgaaagcggccttaccttgactgggttcctttttctgcatgccctctttattgaaaaaggtcgtttggaaactacttggactgtattgaggaaatttggttacgacaatgacatcaagcttagggatgatctcattgcaatgccaattaaaagagctcctgatcaaactctggaaatgacaagcgaagtggtcgatttcttgagagggatattcaacatgtttgacattgataatgatggagctttactacctactgagctggaggaccttttctcaacagcacctgaaaacccatggatttctgatccctataaagactgtgctgaaaagaatgtgttgggtggtctgtcacttgaaggttttctctcaaagtgggctcttatgacacttctagatccaacaaatagttatgccaaccttgcatatgttggttatcctggtgagttcagttctgcatttactgtcacaaggagaagacgagtggatcgtaaaaagcaacatacgcagagaaacattttccagtgttatgtttttggtgccagaggctctggaaagacgtcgttgctacaatcattcattggaaggcaaccttctgacactctgccatctaacagcgaacgctttgcaacaaattctgttgaaatggctgatggaactagaaagacgctaatactgcgagagatacctgaaggtgacgtgagatcgttactttctgacagggaatcgttggcgccatgtgatgtagcagtatttgtttacgatagctgcgatgaatattcatggcaaagagctagagacttgcttgtgcaagtggctacacatggagaaaatactggctacgaagttccttgcttgatagttgctgcaaaagatgatcttgaccaatcttcacaagctctacaagaatcgactagagtgagccaagacatgggaattgaaacaccaattccgatcagcgtgaagctgagagatttgaacaacattttctgcagaatcgtgcatgctgcgcagcagcctcatttgagcattccagagactgaaactggaaaagcacgtcggcaatatcggcaacttctaaaccgttcgctaatggttgtctctgttggagctgctgttgcagttgttggattagctgcttatcgggtttatgcagctcggaagaactcgtcctcttga

SEQ ID NO: 124 - protein, 647 aa, Zea mays
MAGATSLAAAANLAGKSSVRVVVIGDPGTGKSSLIVALATEQFPENVPRVMPPTRLPADYFPDRVPITIIDTSSSPEQKPKLIAECQAADAVVLTYACDRPATLERLSSFWLPELRRLQLKAPVIVVGCKLDLRDEQQVSLEQVMAPIMQSFREIETCIECSALRQIQVPEVFYYAQKAVLHPTAPLFDQELQALKPRCVRALKRIFIICDNDKDGALSDVELNEFQVRCFNAPLQPTEISGVKRVVQEKMPEGVNESGLTLTGFLFLHALFIEKGRLETTWTVLRKFGYDNDIKLRDDLIAMPIKRAPDQTLEMTSEVVDFLRGIFNMFDIDNDGALLPTELEDLFSTAPENPWISDPYKDCAEKNVLGGLSLEGFLSKWALMTLLDPTNSYANLAYVGYPGEFSSAFTVTRRRRVDRKKQHTQRNIFQCYVFGARGSGKTSLLQSFIGRQPSDTLPSNSERFATNSVEMADGTRKTLILREIPEGDVRSLLSDRESLAPCDVAVFVYDSCDEYSWQRARDLLVQVATHGENTGYEVPCLIVAAKDDLDQSSQALQESTRVSQDMGIETPIPISVKLRDLNNIFCRIVHAAQQPHLSIPETETGKARRQYRQLLNRSLMVVSVGAAVAVVGLAAYRVYAARKNSSS

SEQ ID NO: 125 - DNA, 2430 bp, Zea mays
atgagctcaatggcatcgctgtcagaaagtgagctgacaaaccggggaagcatgtgggagctagatcagaaccttgatcaacccatggatgaggaggcaggcaggctgaagaatatgtacagagaaaagaagttctcatcagctttgttactacggttggcatttcagagccttggggtggtctttggtgacttgggcacgtcacctttatatgtgttctataatatatttcctcgtggaataggtgagggtgaggatgaggatgttattggagctctttccttgattatttacaccctcactttcataccgcttctgaagtacgtttttgttgtcttgagggcaaatgacaacggtcaaggcggtacatttgctctttattccctgttatgccgtcatgcaaagatcaacaccatacctaatcaacacaggaccgatgaggaattaacgacgtatagccggcaaacatatgaagagaattcagttgcagcaaaaataaagagatggatagagtcacatgcatataagagaaacattcttcttgttcttgttttaattggtacttgtacagcaattggagatggaatccttacgcctgctatatctgttctttctgcatcaggtggcattagggtccagaatcagaatatgagcaccgatgttgttgtgctcgtcgccgtggtcatcttaattggattatttagcatgcaacactatggaacagataaagtgggactgctctttgcaccgatagttctcctatggttcatcttaattggaagcgtcggagctataaacatacacaagtataataactctgtgctaagagcatacaacccgatatctatataccgttttttccaacggagaagaaattatgacatatggacgtctcttggaggaatcatgcttagcatcacgggaaccgaagcgttatttgctgatctctgtcactttcctgtattggcaattcagattgctttcaccttgattgtgtttccatgccttctactggcgtacacaggacaggctgcctacataatttccaacaaaacacatgtggctgacgccttctatcgatcaattccagatgccatatactggcccgcctttgtcatagcaactgctgcagcaattgttgcaagtcaagctaccatatctgcaacctactcaatcataaagcaagctcttgcacttggttgcttcccccgcgtgaagatagtccacacctcgaagaaattccttgggcagatttacatgcctgacatcaattggatccttctggttctctgcattgccgtgactgcaggattcaagaaccagagccagataggaaatgcatatggtactgctgtggttatagtgatgctagttaccacattcctgatggtgccaataatgctgctggtatggaagagccactggatcctcgtggtgaccttcatcgtgctgtcgctcatggtggaggttccctacttcgtggcctgcatactgaagatcgaccagggtggctgggtcccactcgtcgtggcgacggccttcttcctcatcatgtacgtgtggcacttctgcacggtgaagcggtacgagttcgagatgcacagcaaggtgtccatggcgtggatcctggggctgggcccgagcctgggcctggtgagggtcccagggatcggcttcgtgtacacggagctggcgagcggcgtgccgcacatcttctcccacttcatcaccaacctccccgcgatccactcggtggtggtgttcgtctgcgtcaagtacctccccgtgtacaccgtgccgacggaggagcggttcctggtgcggaggatcgggcccaggagcttccacatgttccggtgcgtggcgaggtacgggtacaaggacctgcacaagagggacgaggacttcgagaaggtgctgttcgactgcgtcctcttcttcgtccggctggagagcatgatggagggctactccgactcggatgagttcagcgtgccggagcaggcgcccggcatcggccgcgcggcgttcttgagcgtgggcgagcggacctgcgcgactgtgtgctccagcggtgatctgagcttctcgtcacaggactcggtcgtgcccgccgccgcgcagtcgtcccgagcgccgacggggctgcgggtgctgcactactcggcgtcggcgtcggcggcggggcagggcagcagcggcggaacggtgggcgacgagctggagttcctgaaccggtgcaaggacgccggcgtggtgcacatcctcgggaacaccatcgtgcgcgcgcggcgggattcgggcgtcgtgaagaagctcgccgttgactacatgtacgctttcatgaggagggtgtgcagggagaacagcgtcatcttcaacgtgccccatgagagcctgctcaatgtcgggcagatattctacatctga

SEQ ID NO: 126 - protein, 809 aa, Zea mays
MSSMASLSESELTNRGSMWELDQNLDQPMDEEAGRLKNMYREKKFSSALLLRLAFQSLGVVFGDLGTSPLYVFYNIFPRGIGEGEDEDVIGALSLIIYTLTFIPLLKYVFVVLRANDNGQGGTFALYSLLCRHAKINTIPNQHRTDEELTTYSRQTYEENSVAAKIKRWIESHAYKRNILLVLVLIGTCTAIGDGILTPAISVLSASGGIRVQNQNMSTDVVVLVAVVILIGLFSMQHYGTDKVGLLFAPIVLLWFILIGSVGAINIHKYNNSVLRAYNPISIYRFFQRRRNYDIWTSLGGIMLSITGTEALFADLCHFPVLAIQIAFTLIVFPCLLLAYTGQAAYIISNKTHVADAFYRSIPDAIYWPAFVIATAAAIVASQATISATYSIIKQALALGCFPRVKIVHTSKKFLGQIYMPDINWILLVLCIAVTAGFKNQSQIGNAYGTAVVIVMLVTTFLMVPIMLLVWKSHWILVVTFIVLSLMVEVPYFVACILKIDQGGWVPLVVATAFFLIMYVWHFCTVKRYEFEMHSKVSMAWILGLGPSLGLVRVPGIGFVYTELASGVPHIFSHFITNLPAIHSVVVFVCVKYLPVYTVPTEERFLVRRIGPRSFHMFRCVARYGYKDLHKRDEDFEKVLFDCVLFFVRLESMMEGYSDSDEFSVPEQAPGIGRAAFLSVGERTCATVCSSGDLSFSSQDSVVPAAAQSSRAPTGLRVLHYSASASAAGQGSSGGTVGDELEFLNRCKDAGVVHILGNTIVRARRDSGVVKKLAVDYMYAFMRRVCRENSVIFNVPHESLLNVGQIFYI

SEQ ID NO: 127 - DNA, 1329 bp, Zea mays
tgtaaaacgacggccagtcttaagctcgggccccaaataatgattttattttgactgatagtgacctgttcgttgcaacaaattgatgagcaatgcttttttataatgccaactttgtacaaaaaagcaggcttaaacaatggcggcgatcctcgcgcgcgccggcgtcatcgccaccgccggcaaaggtttctcgggccgccgccggggcaatggtatcgtcgtcgcggcggtcactaaaacgggggctgctgtgccacaggagggggcgctggaacggccggcgtggtccggcgagaccacgctgtcgcgtctggttggcgcgctcatcgcgttcaagccgctctacgcggtattgaagctcgcctcccgcgaggtcatcatcaggacggcggagaagtcgaacatcccgtggagggagatgacgaaggaggtgctggagtcggacgtgtacgaggtgttcgagagaatccaagacccaaacctcgtgtaccctgactactatctcaacccgtttcatgcctacgacgaagggaatctatcatggctggctgcagcagaggcggagcctgcaacaatgtcgatcgcaaagagggcaatacctgaggctacatcaatcgaagaggccaaccaaattgtccgcggcaactggctgaatgtgattgaggagcatcatctgaagtactcggggaactgtcaggtaaacgacatcctggacattggctgctctgttggagtaagcaccagatacctcgccgagaagttcccatcagctcaagctgttgggctcgacctatcaccgtactttcttgctgtggcggcacaaaaggaagaaaaactgtcacggccaaagcctattcgctgggttcatgccaatggtgaagcgaccgggctgtcttcagattcatttgaccttgtctcccttgcttatgtgtgccatgagtgcccagcacgagcaatcacgggattagtgaaggaagcattcagggtccttcgcccgggaggaacaatcgccttaactgacaattcgcctaaatccaaagtgcttcaggaactatccccagttttgttcactctgatgaagggtaccgagcctttcctggacgagtactacatgctggatttggaggagacgatgagaaaagtgggctttgttaacgtttgctccgtcctgacagaccccaggcacagaacagtcactgcaaccgtgccttactaaacccagctttcttgtacaaagttggcattataagaaagcattgcttatcaatttgttgcaacgaacaggtcactatcagtcaaaataaaatcattatttgccatccagct

SEQ ID NO: 128 - protein, 359 aa, Zea mays
MAAILARAGVIATAGKGFSGRRRGNGIVVAAVTKTGAAVPQEGALERPAWSGETTLSRLVGALIAFKPLYAVLKLASREVIIRTAEKSNIPWREMTKEVLESDVYEVFERIQDPNLVYPDYYLNPFHAYDEGNLSWLAAAEAEPATMSIAKRAIPEATSIEEANQIVRGNWLNVIEEHHLKYSGNCQVNDILDIGCSVGVSTRYLAEKFPSAQAVGLDLSPYFLAVAAQKEEKLSRPKPIRWVHANGEATGLSSDSFDLVSLAYVCHECPARAITGLVKEAFRVLRPGGTIALTDNSPKSKVLQELSPVLFTLMKGTEPFLDEYYMLDLEETMRKVGFVNVCSVLTDPRHRTVTATVPY

SEQ ID NO: 129 - DNA, 896 bp, Zea mays
gttgcaacaaattgatgagcaatgcttttttataatgccaactttgtacaaaaaagcaggcttaaacaatgaagttaaggacaaaacgacctgaatggaagtcccttgtgcctctacaactgagcagattgagcaggaaatctgccatgcgtttctttttgttccccaaggttcagtcggctggtcaatcgccagatgataccccagtttatcttaatgtgtacgatttgacgccaatgaatggttatatatattgggcaggcctgggcatatttcactcaggaattgaagttcatggggttgaatatgcattcggagcacatgactttcccaccagtggggtctttgaggtagaacctcaccaatgccctggtttcagattcagaaaatcaatatttcttggaacaacatgcttggatccaatccaagttaggcagttcatggagctgcaatcagtaaactacaacggtgatacttaccatcttatcacgaagaactgtaaccacttctgcaaggatatgtgctacaagttgaccggtaacaaaattcccaaatgggtgaatcggctcgccagaataggcgccatttgcaactgccttctcccggagtcgcttaagatctctccggttggccatgacccaaacagtcaatccgaagactcggagaagaggcgtctgaggaacccattcagctgcttctcttcgatctcgagccaccggcagctgccgtcgtcatctcctttcccaccatctcctgtgaaagggggcctcccccgttgctcgtcgaggaaaagcagcacggcgtctccgaaaaataggtagacccagctttcttgtacaaagttggcattataagaaagcattgcttatcaatttgttgcaacgaacaggtcacta

SEQ ID NO: 130 - protein, 250 aa, Zea mays
MKLRTKRPEWKSLVPLQLSRLSRKSAMRFFLFPKVQSAGQSPDDTPVYLNVYDLTPMNGYIYWAGLGIFHSGIEVHGVEYAFGAHDFPTSGVFEVEPHQCPGFRFRKSIFLGTTCLDPIQVRQFMELQSVNYNGDTYHLITKNCNHFCKDMCYKLTGNKIPKWVNRLARIGAICNCLLPESLKISPVGHDPNSQSEDSEKRRLRNPFSCFSSISSHRQLPSSSPFPPSPVKGGLPRCSSRKSSTASPKNR

SEQ ID NO: 131 - DNA, 1446 bp, Zea mays
atggacgcggcggcgaagaagatgacgcggagcatctcgcggcagctctcgtcgggggcggcgcggctgtggcgccagctgtcgctggacccgcacaccccgcgccgcggcggcccgggcccggtcccagcggcgggggccgggcagacgcggttcgcgatcgccaggcagtcgtcgctcgacccgacgccgcgcggcgggccggacgggtcgtcggcgcaccagcagctcgcggtgccggagaacctggacgccaccatgcgcctgctcttcgccgcgtgccagggggatgccgccggggtcgaggagctgctcaggagcggggtggacgtcgacagcatcgacctcgacggacgtacggcgctgcacatcgcggcctgcgaggggcagggggaggtcgtgcgcctgctgctcgactggaaggccaacatcaacgcccgcgaccgctggggtagcacgccagcagcagacgcgaaacattacggccattttgaagtatataatactctgagagcaagaggagcaaaagttccgaaaaccagaaagaccccgatggctgtgtcaaatccgaaacaagttccagagtatgaactgaacccacttgaactggagtttcgaagaggagaggaggtcacaaagggtacatatctggcaaaatggtatggctcgaaagtttttgttaagatactagacaaagacagcttctcagatgctgaaagcataaatgcgttcaaacacgagcttaccttacttgagaaagcacgacatcccaatttggtccaatttgttggagctgtcacgcaaaatgtcccgatgatgattgtttcagagtaccatcaaaagggtgatttagccagttatattgagatgaaaggtcggctgaagcctcacaaagctataagatttgctcttgacattgcgaggggactgaattatctccatgagtgcaagcctgagccaatcattcatggaaatttgtcgccaaaaaacatcattcgggacgatgaaggacaacttaaggtggctggttttggatcactgagtttgagtaaagtttctgaagataaagtacaaatggctcagccagttacaaaatttgacaatgtatacatcgctcccgaggtctacaaaaacgaaccatttgacagaagtgtagatgtatttgcatttggtctcattctttatgagatgattgaaggagctcctgcttttcacccaaagccacaagaggaagcagctaagatgatttgcttagaggggctgagaccaccattcaagaataaaccgaaatactaccccagtgatgtgaaagagttgatacaagaatgctgggatccgatgccttccgtcaggccaacattcgcggagataattgtgcgcctgaacaagatacatgcgaactgtgctaagcagggtagctggagagacaccttcaagcttccatga

SEQ ID NO: 132 - protein, 481 aa, Zea mays
MDAAAKKMTRSISRQLSSGAARLWRQLSLDPHTPRRGGPGPVPAAGAGQTRFAIARQSSLDPTPRGGPDGSSAHQQLAVPENLDATMRLLFAACQGDAAGVEELLRSGVDVDSIDLDGRTALHIAACEGQGEVVRLLLDWKANINARDRWGSTPAADAKHYGHFEVYNTLRARGAKVPKTRKTPMAVSNPKQVPEYELNPLELEFRRGEEVTKGTYLAKWYGSKVFVKILDKDSFSDAESINAFKHELTLLEKARHPNLVQFVGAVTQNVPMMIVSEYHQKGDLASYIEMKGRLKPHKAIRFALDIARGLNYLHECKPEPIIHGNLSPKNIIRDDEGQLKVAGFGSLSLSKVSEDKVQMAQPVTKFDNVYIAPEVYKNEPFDRSVDVFAFGLILYEMIEGAPAFHPKPQEEAAKMICLEGLRPPFKNKPKYYPSDVKELIQECWDPMPSVRPTFAEIIVRLNKIHANCAKQGSWRDTFKLP

SEQ ID NO: 133 - DNA, 839 bp, Zea mays
ttattttgactgatagtgacctgttcgttgcaacaaattgatgagcaatgcttttttataatgccaactttgtacaaaaaagcaggcttaaacaatggcttccattgtcgcttccaggagggccgttcctctagttcgcgctctggagaagctcatcgcagcgtcctccgctcccgggactggctccgccctcaggccggtggcagtcgccggcggcctccgcggctacaacaccggcgctccgctccgacgctacgagggggccgagtcggaagacgatagcgtccgcgagtacgatgggcggcacggcggccgggactacgctgtgcccagcctgttctcagatattttccgtgatccgcttagtgcgccgcacagcattggccgcctgctgaaccttgtggacgacttggcggtggcggcgccaggtcgtgcggtgcgccgtggctggaacgcgaaggaggacgaggaggcgctgcacctgagggtggacatgccaggcctggggaaggagcacgtcaaggtgtgggcggagcagaacagcctggtgatcaagggcgagggcgagaaggaggatagcgaggacgaggccgccccgcctccgagatacagcggtcgcatcgagctcgcgccagaggtttacaggatggacaagatcaaggcggagatgaagaacggcgtgctcaaggtggtcgtgccgaaggtgaaggagcagcagcgcaaggacgtgttccaagtcaacgtcgagtagacccagctttcttgtacaaagttggcattataagaaagcattgcttatcaatttgttgcaacgaacaggtcactatcagtcaaaataa

SEQ ID NO: 134 - protein, 218 aa, Zea mays
MASIVASRRAVPLVRALEKLIAASSAPGTGSALRPVAVAGGLRGYNTGAPLRRYEGAESEDDSVREYDGRHGGRDYAVPSLFSDIFRDPLSAPHSIGRLLNLVDDLAVAAPGRAVRRGWNAKEDEEALHLRVDMPGLGKEHVKVWAEQNSLVIKGEGEKEDSEDEAAPPPRYSGRIELAPEVYRMDKIKAEMKNGVLKVVVPKVKEQQRKDVFQVNVE

SEQ ID NO: 135 - DNA, 653 bp, Zea mays
taagctcgggccccaaataatgattttattttgactgatagtgacctgttcgttgcaacaaattgatgagcaatgcttttttataatgccaactttgtacaaaaaagcaggcttaaacaatgtcagtggtctggcggttggacacttccatgtgggctccgcatgtcggtgagatttcgggttgtatagagtgccaactccagcagctgaatcgatccccgaataccctagtgacggcggcggagatggacgaccgaggcggcggcggggacgccaagaggtggccgtggtgggctgcggcgagcgcggcacaggccgcggccgggctcgcgtggttccgacggggcaggagcggaacggcagtggcgatgccgttcaaggcattcggcatcgcctccctcatcgtcggctccggcgccaccgccgtcgccgctggggtgcttgccgcgggcgtcggatcggtggaggagatgaagggcgtgggcgcgagcatccggcggtggatgggagctcctcctcgccgagcgggaggtagtgactaaacccagctttcttgtacaaagttggcattataagaaagcattgcttatcaatttgttgcaacgaacaggtcactatcagtcaaaataaaatcattatttgccatccagctg

SEQ ID NO: 136 - protein, 140 aa, Zea mays
MSVVWRLDTSMWAPHVGEISGCIECQLQQLNRSPNTLVTAAEMDDRGGGGDAKRWPWWAAASAAQAAAGLAWFRRGRSGTAVAMPFKAFGIASLIVGSGATAVAAGVLAAGVGSVEEMKGVGASIRRWMGAPPRRAGGSD

SEQ ID NO: 137 - DNA, 423 bp, Zea mays
atgcagatccgggtgcagtgcgcgtgcggcgagtcgtcgtgcccggaatgggccgtcgtggagctgcagggcgtggtgcagccgcaggcctccttcgccggcgacatccggggactccacatcggccgcctctgctcctccccttccccagcctccgcctcgtccaaggcagggttcaccttcacggtggggtaccacgagctcgccggcacaaaggtgacgctcaagaagcccctgctggtgctcaggaagaagaaggttaatgctggtgctcaggaagaagagccaccgacggcggcggaggtggagctggaggtgatcggcatcatccggcacaagatcctattcaaggaccgccccaaggccctcatctcaaagccgccaaccaaggagaagaaggccgtgcagccagcagcaaagtga

SEQ ID NO: 138 - protein, 140 aa, Zea mays
MQIRVQCACGESSCPEWAVVELQGVVQPQASFAGDIRGLHIGRLCSSPSPASASSKAGFTFTVGYHELAGTKVTLKKPLLVLRKKKVNAGAQEEEPPTAAEVELEVIGIIRHKILFKDRPKALISKPPTKEKKAVQPAAK

SEQ ID NO: 139 - DNA, 533 bp, Zea mays
gccccaaataatgattttattttgactgatagtgacctgttcgttgcaacaaattgatgagcaatgcttttttataatgccaactttagtttgtacaaaaaagcaggcttaaacaatggtgaacgttcctaagaccaagaagacctactgcaagaacaaggagtgcaagaagcacactctccacaaggttactcagtacaagaagggtaaggatagcctgtctgcccagggaaagcgccgttatgaccgcaagcagtcaggatatggtggccagaccaagcctgtcttccacaagaaggccaagaccaccaagaaaatcgtgttgaagctgcagtgccagagctgcaagcactactcacagcacgcaattaagaggtgcaagcattttgagattggtggagacaagaagggcaagggaacatctctcttctaaacccagctttcttgtacaaagttggcattataagaaagcattgcttatcaatttgttgcaacgaacaggtcactatcagtcaaaataaaatcattatttg

SEQ ID NO: 140 - protein, 105 aa, Zea mays
MVNVPKTKKTYCKNKECKKHTLHKVTQYKKGKDSLSAQGKRRYDRKQSGYGGQTKPVFHKKAKTTKKIVLKLQCQSCKHYSQHAIKRCKHFEIGGDKKGKGTSLF

SEQ ID NO: 141 - DNA, 1285 bp, Zea mays
gatagtgacctgttcgttgcaacaaattgatgagcaatgcttttttataatgccaactttgtacaaaaaagcaggcttaaacaatgaatccgaacacagagagacagacagagctcccgcagaaggctacaaaggcgcgaaacttcgttgacccaaaacagagaaccccaaccgccgcggcagtagtgatcatggtgaaggaagaggaggaggtcatggcagaggcagcaggaggtggacgcggcggctacatggacctgctcggtctcggagaagaggactacctgctgtgcctgtccccttcctcctcctgcttcactcccagtgtcgtctccgtcaccggcgccacgatcaccaccaccaccaccactcccgccgcgccgtcgcctacctgctgcgcctactacctggacctggctcccgctcaccaccacacgctgggcttcgctgaccgagagcagcagtaccatggcgacgacggcgccctcggcttccagcactccggcgacgatcgcgcggttccggcggctgttccgcacaagtccagcacaaccaccgagtgctcctcctccgtctcctccatgtcgtcctcgccgcccgcgaccgcagtctcggccgtctccagctcaaagccgcaggctcccaagaagaagggatcaaggagcagcagcgaccagagaaaggctgcgtccgccgctgctcctgctacggctgctggtgctacgaacaagaggcccagggtgaggagggagaggctcggcgagaggatcatagctctgcagcagctggtttctccgttcggaaagtctgatacggcttccgttctgcacgaggcgctgggatacatacgcttcctacacgaccaggttcaggtcctgagctcgccctacatgcagcggcgccagccggcctcagcagcgcacgtccaggcgcaggagagcgcggcggggacggtggtggagccggcgctgccgagcgacctgaggagccggggcctgtgcctggtgcccgtctcctacacggataacttcgccggccacggccacggccacggcaacggcgccgacctctggtccgtggtggcggggacagggatggggacggcgaaggcggccgtggacaacgagggggctgccggcggaacgctgctgcctggtggtggtggtggtgctggtcaccctcgctttacggattatgcgagggtttagacccagctttcttgtacaaagttggcattataagaaagcattgcttatcaatttgttgcaacgaacaggtcactatc

SEQ ID NO: 142 - protein, 374 aa, Zea mays
MNPNTERQTELPQKATKARNFVDPKQRTPTAAAVVIMVKEEEEVMAEAAGGGRGGYMDLLGLGEEDYLLCLSPSSSCFTPSVVSVTGATITTTTTTPAAPSPTCCAYYLDLAPAHHHTLGFADREQQYHGDDGALGFQHSGDDRAVPAAVPHKSSTTTECSSSVSSMSSSPPATAVSAVSSSKPQAPKKKGSRSSSDQRKAASAAAPATAAGATNKRPRVRRERLGERIIALQQLVSPFGKSDTASVLHEALGYIRFLHDQVQVLSSPYMQRRQPASAAHVQAQESAAGTVVEPALPSDLRSRGLCLVPVSYTDNFAGHGHGHGNGADLWSVVAGTGMGTAKAAVDNEGAAGGTLLPGGGGGAGHPRFTDYARV

SEQ ID NO: 143 - DNA, 1857 bp, Zea mays
aatgattttattttgactgatagtgacctgttcgttgcaacaaattgatgagcaatgcttttttataatgccaactttgtacaaaaaagcaggcttaaacaatggccccgagtaacatcgtcgttcagagcagcagcactccgccggttgccggcggcgacgaggagttcgcgccgtctgtatggggagatttcttcgtcacctatgccactcccgtctcacaggcatcagagcagcggatgagtgagagagcggagctgctcaaggcgcaagtacgtcaggcgttcgatgctgccagcatggatgttgcaggtctgatcacgtacgtcgacaccctcgaacgcctcggcttagacaaccacttccgcgacctcatcggagctgccctggaacgaatcggagctgaggagctgccggagcacggcggcggcctgcacatcgtcgcgcttcggtttcgcctgctccggcagcatgggatatgggtatctacagatgtgttcgacgcgttcagagaggacgcgggcggtttctgctcgagcctctgcagtgacgaccctaggggtctcctgagcttgtacaatgcggctcacatggcagtacccggcgaggtggtcctcgacgacgccatcgccttcgcgaggggccgcctcctggacatcatcagcaaaggcgaggtcaggtcaccggtgtcagagcagatcacacgagccctcgacatccccctcccacgatttacgaggcggctggaaaccatgcactatattgccgagtatgagcatgaagaggcacacgacggcctgctgcttgagctcgctaggctcaactttgtccttgtgagagcgcttcacctcagggagctgaaggacctgtcactatggtggagggagctctacaacactgtgaagctcccgtacgctcgggaccgtatggtggagatctacttttggacctgtggtatgcttcatgaggaggagtactccctggcacggatgttcttcgccaagacgttcgggatggtgtcactgatggacgacactttcgatgtccatgctactctagacgagtgtcacaagctcaaagaagctatgcagagatgggatgaaagtgaggtctccattctacccgagtatctacgcttgctgtatatcaaaacacttagcaacttcaaagagtttgaggagatcttggaaccgaacaagaagtaccgcatggcttacacaaaagaggcatacaagttgtgctccaaaaactacctaaaggaagccatctggtctaaccagaaataccagccaagcttcaaggagcatgaggagctatcaatcatgacctcaggcttgccgatgctcacgatcctaacactaatgggcttcggtgacgaggcaaccccggaggcgttcgaatgggtaagcagtgttcctgaaatggtccgcgctggttcgcaggtcactcgcttcctcaacgatttgtcttcttacaagttgggaaagaacaagaaagatatgcctggctctgtggagacctacatggtagagaatggcttaacaggagatgaggctgcagcggcaatcgcggcacttctagagaacaggtggagaatactaaaccaaacaaggatggagatagatcacacgctactgccagcggcgcaggtggtgctcaacatggcgagggcaaatgagatcatttacctccacggcagagacgcctacaccttcggtgctgacctcaaggaccttgtcaccacactcttcctcaagcaagtgctccctctctagacccagctttcttgtacaaagttggcattataagaaagcattgcttatcaatttgttgcaacgaacaggtcactatcagtca

SEQ ID NO: 144 - protein, 557 aa, Zea mays
MAPSNIVVQSSSTPPVAGGDEEFAPSVWGDFFVTYATPVSQASEQRMSERAELLKAQVRQAFDAASMDVAGLITYVDTLERLGLDNHFRDLIGAALERIGAEELPEHGGGLHIVALRFRLLRQHGIWVSTDVFDAFREDAGGFCSSLCSDDPRGLLSLYNAAHMAVPGEVVLDDAIAFARGRLLDIISKGEVRSPVSEQITRALDIPLPRFTRRLETMHYIAEYEHEEAHDGLLLELARLNFVLVRALHLRELKDLSLWWRELYNTVKLPYARDRMVEIYFWTCGMLHEEEYSLARMFFAKTFGMVSLMDDTFDVHATLDECHKLKEAMQRWDESEVSILPEYLRLLYIKTLSNFKEFEEILEPNKKYRMAYTKEAYKLCSKNYLKEAIWSNQKYQPSFKEHEELSIMTSGLPMLTILTLMGFGDEATPEAFEWVSSVPEMVRAGSQVTRFLNDLSSYKLGKNKKDMPGSVETYMVENGLTGDEAAAAIAALLENRWRILNQTRMEIDHTLLPAAQVVLNMARANEIIYLHGRDAYTFGADLKDLVTTLFLKQVLPL

SEQ ID NO: 145 - DNA, 789 bp, Zea mays
atggtgaagggcgcccagctccaggacgcggcggccgacgccgcccgcaatgcggcggcggcggcggcgaggcagcagggctgtggtggcggcggcccggcgggctgcggcaagaggcagtacaagggcgtgcggatgcggagctggggctcctgggtgtcggagatcagggcgcccaaccagaagacccggatatggctcggctcctactccaccgccgaggccgccgcgcgcgcctacgacgccgccctgctctgcctcaagggctccgccgccgacctcaacttccccgtgcacctccccttccacatccccgccgccgccatgtcgcccaagtccatccagcgcgtcgccgccgccgccgcggccaatgccacctgcggcagcccgctgcaggccggcgccggcgccgccgccgccgcgccccactactactcctactcctcctccgccgcctccacgatggccgccgacggcgccacccctccgtgcagctacggcgacgcgtcgtcgggcgtgagctccccggagacggccgggaacactgatgacctgtgctacggcgtggcgcacgacgacgacgtggacatggtggcgggcgacgcggacctcgccgcgctcgcggacatcgagtccttcttccggtcgcccaagtgcatggagtacgctatgatggacccatgcagcacgttcttcgcgccagcgcccatggcgacggacgcggccagcgagtgggagtgggaggaggaaggcgagatcgacctctggagcttctcgtccctcaactga

SEQ ID NO: 146 - protein, 262 aa, Zea mays
MVKGAQLQDAAADAARNAAAAAARQQGCGGGGPAGCGKRQYKGVRMRSWGSWVSEIRAPNQKTRIWLGSYSTAEAAARAYDAALLCLKGSAADLNFPVHLPFHIPAAAMSPKSIQRVAAAAAANATCGSPLQAGAGAAAAAPHYYSYSSSAASTMAADGATPPCSYGDASSGVSSPETAGNTDDLCYGVAHDDDVDMVAGDADLAALADIESFFRSPKCMEYAMMDPCSTFFAPAPMATDAASEWEWEEEGEIDLWSFSSLN

SEQ ID NO: 147 - DNA, 1527 bp, Zea mays
ggccccaaataatgattttattttgactgatagtgacctgttcgttgcaacaaattgatgagcaatgcttttttataatgccaactttgtacaaaaaagcaggcttaaacaatgcagatgatgatgctctctgatctctcgtctgacgaccacgaggccactggatccagctcctatggcggggacatggccagctacgccctcagccctctcttcctcgcaccggcggcctcggccaccgcgccgctgccgccacctccgcagccgccggccgaggagctcaccaacaagcaggccgcgggcggcggcaagaggaagagaagccagccggggaacccagaccccggcgcggaggtgatcgcgctgtcgccgcgcacgctggtggcgacgaaccggttcgtgtgcgagatctgcaacaaggggttccagcgggaccagaacctgcagctgcaccgccggggccacaacctcccctggaagctccgccagcgcagcagcctcgtcgtcccgtcgtcgtcggcggcggcaggctccggcggcaggcagcagcagcagcagggcgaggccgcgccgacgccgccgcgtaagcgcgtctacgtctgccccgagcccacgtgcgtgcaccacgacccggcgagagctctgggggacttgactgggatcaagaagcacttctcgcggaagcacggggagaagcggtggtgctgcgagcgctgcgggaagcgctacgccgtgcagtcggactggaaggcgcacgtcaaggggtgtggcacgcgcgagtaccgctgcgactgcggcatcctcttctccaggaaggacagcctgctcacgcacagggccttctgcgatgccctagcagaggagagcgcgaggcttcttgcagcagcagcaaacaacggcagcactatcaccacgaccagcagcagcaacaacaatgatcttctcaacgccagcaataatatcacgccattattcctcccgttcgccagctctcctcctcctgtcgtcgtagcggcggcacaaaaccctaataacaccctcttcttcctgcaccaagagctgtcccccttcctgcaaccgagggtgacgatgcaacaacaaccctcgccctatcttgacctccatatgcacgtcgacgccagcatcgtcaccaccaccggtggtctcgcggacggcacgccggtcagctttggcctcgctctggacggctcggtggccaccgtcggccaccggcgcctcactagggacttcctcggtgtcgatggtggcggtcgtcaggtcgaggagctgcagcttccactgtgcgccacagcagccgcagcaggtgccagccgcaccgccagctgcgccaccgacctgacaaggcagtgcctcggcggccggctgccgccggtcaacgagacctggagccacaacttctagacccagctttcttgtacaaagttggcattataagaaagcattgcttatcaatttgttgcaacgaacaggtcactatcagtcaaaataaaatcattatttgccatc

SEQ ID NO: 148 - protein, 436 aa, Zea mays
MQMMMLSDLSSDDHEATGSSSYGGDMASYALSPLFLAPAASATAPLPPPPQPPAEELTNKQAAGGGKRKRSQPGNPDPGAEVIALSPRTLVATNRFVCEICNKGFQRDQNLQLHRRGHNLPWKLRQRSSLVVPSSSAAAGSGGRQQQQQGEAAPTPPRKRVYVCPEPTCVHHDPARALGDLTGIKKHFSRKHGEKRWCCERCGKRYAVQSDWKAHVKGCGTREYRCDCGILFSRKDSLLTHRAFCDALAEESARLLAAAANNGSTITTTSSSNNNDLLNASNNITPLFLPFASSPPPVVVAAAQNPNNTLFFLHQELSPFLQPRVTMQQQPSPYLDLHMHVDASIVTTTGGLADGTPVSFGLALDGSVATVGHRRLTRDFLGVDGGGRQVEELQLPLCATAAAAGASRTASCATDLTRQCLGGRLPPVNETWSHNF

SEQ ID NO: 149 - DNA, 1402 bp, Zea mays
taagctcgggccccaaataatgattttattttgactgatagtgacctgttcgttgcaacaaattgatgagcaatgcttttttataatgccaactttgtacaaaaaagcaggcttaaacaatggagctcccgtggggaatgctgctgccgctgctgctggtcctctccgtctcgtccccgtcctcgtcgtcggctgctgccacgctcgccgtcaccgctccgcccccactgcctgttcctcctcctcgtcatgctcaagacgccgaaggcatgctcatcaacggcaacttcgagacggcgccgcggaggctgaacaagaccctcatcgtggggcgccactcgctgccggggtggacggtgcaggggcacgtggagtacgtctcgggcggtccccagcccgggggcatgttcttcgcggtgccgcacggcgtgcacgcgctgcgcctcggcagccgcgcgtcggcgtcgcagaacgtgacggtgcggccgggggcgctgtacgcgctcacgttcgcggcgacgcggacgtgcgcgcaggacgaggccctgcgcgtggcggtggcgccgtcgctctcggcgcccgccgacgtcgccgtgcgcacgctctacagcggcgcgtccgccgacacctgggcctggggcttccgcgcctcctcccccgtcgcgcaggtcacgttcgccaaccccggcgtgcaggaggaccccgcgtgcggcccgctgctggacgccgtcgccatcaaggagctgcccgcgccgtacccgaccaaagacaacctgatcaagaacgacggcttcgagatcggtccccaggtgctcaggaactcgacggtcggcgtgctgctgccccccaagcagaaggacgcgacgtcgccgctgcccggctggatcatcgagtcgctcaaggcggtgcggttcatcgacgcggctcacttctctgtccccgcggggcagtatgcggtggagctggtggccgggcgggagagcgccatcgcgcaggtcatccgcaccgttcccaaccgcgcctacaacctgtcgttcgccgtcggcgacgcccggaacggctgccacggctccatgctggtggaggcgttcgcgggcaacgtcacgcagaaggtgccgttcgattccgccgggaaaggcgggttcaagacggcggcgttcaggttcgtggccggcggcgtccgcacccgcctcaccttctacagctcctactaccacaccaaggtcaccgacggcgtctcgctctgcggccccgtgctggaccaggtcaaggttgtgcctgtcaaggcgtagacccagctttcttgtacaaagttggcattataagaaagcattgcttatcaatttgttgcaacgaacaggtcactatcagtcaaaataaaatcattatttgccatccagct

SEQ ID NO: 150 - protein, 390 aa, Zea mays
MELPWGMLLPLLLVLSVSSPSSSSAAATLAVTAPPPLPVPPPRHAQDAEGMLINGNFETAPRRLNKTLIVGRHSLPGWTVQGHVEYVSGGPQPGGMFFAVPHGVHALRLGSRASASQNVTVRPGALYALTFAATRTCAQDEALRVAVAPSLSAPADVAVRTLYSGASADTWAWGFRASSPVAQVTFANPGVQEDPACGPLLDAVAIKELPAPYPTKDNLIKNDGFEIGPQVLRNSTVGVLLPPKQKDATSPLPGWIIESLKAVRFIDAAHFSVPAGQYAVELVAGRESAIAQVIRTVPNRAYNLSFAVGDARNGCHGSMLVEAFAGNVTQKVPFDSAGKGGFKTAAFRFVAGGVRTRLTFYSSYYHTKVTDGVSLCGPVLDQVKVVPVKA

SEQ ID NO: 151 - DNA, 1258 bp, Zea mays
aattgatgagcaatgcttttttataatgccaactttgtacaaaaaagcaggcttaaacaatgatgtttggtgctcttgtatcagcaactgatcctgtgacagttttgtctatatttcaggagcttggcactgatacaaatctatatgcactggtttttggagaatccgttttaaatgacgctgtagcgatatccttgtacaggtctatggcatctatgaggacgcaccattctggaaaaaactttttccttgtaattctgaggtttcttgaaaattttgttggatcaatgtcatcaggcattggtgttggactaatttccgctctcctcttcaagtatgcagcactgggcgttgagaaccttcacaatctggagagttgcttgtttgtgcttttcccatacttctcgtacatgctagcagaaggcattggtctatctggcattatttctattctcttcacgggtattgtgatgaagagatacacattctctaacttatcagatgattctcagcgttttacagctcgcttttttcaccttctttcttcactagcagaagctttcgtgttcatatacatgggatttgatattgcgatagaacgtcaaagctggtcacatattggattcatatttttctcaattatcttcatactagttgcaagggctgcaaatgtcttctcttgtgcatacatactgaatttggcacgacctccacattgccaaatacctaggcaatatcagcaggctctttggtatagtgggcttagaggagctatggcttttgccctcgctcttcagtctgttcatgatcttccggatggacatggcgagacaatttttactgctaccacatctattgttgttctaactgtactccttattggtggctcaactggaacaatgcttgaggccctacaggtagttggggacagcaaccgttattgccaactgtatgaggagagttctaatggcaacgacactggttacacgggacaaaattatgatgaaggagcatccacttcaagcaaattcagatctaaacttagagatctaaggagaagcacctcgtctttcgctttactggacagaaattaccttactcctattttcacttcgcaaaacggcgactgcaatgataacactacagaaagtcccaatgaagaattgacgatattcagaggacctggggatttggaggtacatgattgaacccagctttcttgtacaaagttggcattataagaaagcattgcttatca

SEQ ID NO: 152 - protein, 382 aa, Zea mays
MMFGALVSATDPVTVLSIFQELGTDTNLYALVFGESVLNDAVAISLYRSMASMRTHHSGKNFFLVILRFLENFVGSMSSGIGVGLISALLFKYAALGVENLHNLESCLFVLFPYFSYMLAEGIGLSGIISILFTGIVMKRYTFSNLSDDSQRFTARFFHLLSSLAEAFVFIYMGFDIAIERQSWSHIGFIFFSIIFILVARAANVFSCAYILNLARPPHCQIPRQYQQALWYSGLRGAMAFALALQSVHDLPDGHGETIFTATTSIVVLTVLLIGGSTGTMLEALQVVGDSNRYCQLYEESSNGNDTGYTGQNYDEGASTSSKFRSKLRDLRRSTSSFALLDRNYLTPIFTSQNGDCNDNTTESPNEELTIFRGPGDLEVHD

SEQ ID NO: 153 - DNA, 1433 bp, Zea mays
aatgattttattttgactgatagtgacctgttcgttgcaacaaattgatgagcaatgcttttttataatgccaactttgtacaaaaaagcaggcttaaacaatggcctcccccaaccccgaggccgcggggctgcaggccgtggctgtggcgggggcaggggagggcggctcgtcctcgtcgctcagcgccgttgcgggagcggctgcgttgtccggggagctggtgcccaggagggcgttggcgctgcgcaaggagcgcgtgtgcacggccaaggagcgcatcagccgcatgcctccctgtgcggcggggaagcggagctccatctaccgcggggtcacccggcataggtggacaggtcgatatgaggctcacctttgggacaaaagcacgtggaatcagaatcagaacaaaaagggcaaacaggtatatctaggtgcatatgatgatgaagaggctgcagcaagggcctatgaccttgctgcattaaaatactggggagctggaacacaaataaatttcccagtatctgactatgcaagagaccttgaagagatgcagatgatatccaaggaggattatctcgtgtctcttaggagaaagagcagtgccttctacagggggttaccaaaatatcgtgggcttcttaggcaacttcataattccagatgggatacatctttgggactcggcaatgactacatgagccttagttgtggcaaggatatcatgttggatgggaaatttgcaggaagctttggtctagagaggaaaattgatcttacaaattacatccggtggtggctaccaaagaagacaaggcagtcagatacatctaaaacagaagaaattgctgatgaaattcgagctattgaaagttcaatgcaacagactgaaccctataagttgccttctcttggcttcagttctccatcaaagccctcttcaatgggcttatcagcatgcagcatattatctcagtctgatgcctttaaaagcttcttggagaagtctacaaaattatctgaagaatgtagtcttagcaaagaaattgttgaaggaaagactgttgcctcggtacctgctactggatatgatacaggggcaattaatattaacatgaatgagttgctagtacaaagatctacttactcaatggcccctgttatgcctacaccaatgaagagtacctggagccctgctgatccttccgtggatccacttttttggagcaactttgttttgccatcgagtcaacctgttacaatggcgacaataacaacaacaacgtttgcaaagaatgaggtaagttcaagtgatccattccagagccaagagtgaacccagctttcttgtacaaagttggcattataagaaagcattgcttatcaatttgttgcaacgaacaggtcactatcagtcaaaataaaatca

SEQ ID NO: 154 - protein, 412 aa, Zea mays
MASPNPEAAGLQAVAVAGAGEGGSSSSLSAVAGAAALSGELVPRRALALRKERVCTAKERISRMPPCAAGKRSSIYRGVTRHRWTGRYEAHLWDKSTWNQNQNKKGKQVYLGAYDDEEAAARAYDLAALKYWGAGTQINFPVSDYARDLEEMQMISKEDYLVSLRRKSSAFYRGLPKYRGLLRQLHNSRWDTSLGLGNDYMSLSCGKDIMLDGKFAGSFGLERKIDLTNYIRWWLPKKTRQSDTSKTEEIADEIRAIESSMQQTEPYKLPSLGFSSPSKPSSMGLSACSILSQSDAFKSFLEKSTKLSEECSLSKEIVEGKTVASVPATGYDTGAININMNELLVQRSTYSMAPVMPTPMKSTWSPADPSVDPLFWSNFVLPSSQPVTMATITTTTFAKNEVSSSDPFQSQE

SEQ ID NO: 155 - DNA, 1563 bp, Zea mays
ttgactgatagtgacctgttcgttgcaacaaattgatgagcaatgcttttttataatgccaactttgtacaaaaaagcaggcttaaacaatggccgctcccgccgccgcgccgctcgacgagggcaaggcgaagaaagtccttcgccaggtcgagttctacttcagcgacagcaacctcccccgcgataagttcctgcgggagacggtcgagcagagcgatgacggattggtgagcttgcccttgatatgctccttctcgcggatgaagtcccacctggggctggacgcagatgtcaagcccgagactgtgccggaggagaccgtgcttgcggttgctgaggtgctccggccttctcctgccctccgcgtatcggaggatggaaagaagattggtagagctagtgaactcttgaagccagatgagatcatagaacaagtagactctaggactattgctgtatctccgctgccttgcaatgtaaagcaggaagacgtccaatcttttttcacaaattatgcaaaggtaaacagcgtgagacttccacgcaatattgccaacaaaaaacacttctgtgggactgctttggttgagttttctgaagaagaggaagcaaaaagaattatggagactgctttagtatttgcaggggcaaatctggaaataaggccaaagaaggagtttgatgctgagcaaaagtccaaaaaagaagcatatgaaaagacacaccttaaaaaggacaaccagtatgaaggctatcaaaaaggcctaattgtggccttcaaattggagaaggccacagctgatactgtagtgcagcaagataacatagataaagagaatgactctgctacgaaattagatgtttccagttccatggaaaaaccttcaggccaggggccagaggagtctatccttgagagcgatgttattaagcaagggatgtcctcagatgacatgaccaaagagaaagatctaaacactggggaagctacagaatctgagaagtgtattagtgatgtccccatagaaagtgataaacatggtgatagtgaaccattgagcagggaaggcaaaatcatttctggcaatgtgaatgtgaagaaccaaatatcgagggaggatctaaaagaagcattcaaaaaatttggagctgtccggtatgtggacttcagcatcggagataattcaggataccttcgctttgaagattctaaggcagctgaaaaagcccgcatgtctgcagtacttgctgatggtggcttgataattaaggaccacattgttactttggagcctgtgactggtgaagctgagaaggattattgggacacaatccgcagtattcaaggaaagtacaaggatagtagaagctacaagggaagggcttcaaataaccagagaggaggaaagcgtttcaacgcgaagcgagatagaaacccagactcggagaagaattctaacaaggctcggaaggttgaagctatcgcatgaacccagctttcttgtacaaagttggcattataagaaagcattgcttatcaatttgttgcaacgaacaggt

SEQ ID NO: 156 - protein, 467 aa, Zea mays
MAAPAAAPLDEGKAKKVLRQVEFYFSDSNLPRDKFLRETVEQSDDGLVSLPLICSFSRMKSHLGLDADVKPETVPEETVLAVAEVLRPSPALRVSEDGKKIGRASELLKPDEIIEQVDSRTIAVSPLPCNVKQEDVQSFFTNYAKVNSVRLPRNIANKKHFCGTALVEFSEEEEAKRIMETALVFAGANLEIRPKKEFDAEQKSKKEAYEKTHLKKDNQYEGYQKGLIVAFKLEKATADTVVQQDNIDKENDSATKLDVSSSMEKPSGQGPEESILESDVIKQGMSSDDMTKEKDLNTGEATESEKCISDVPIESDKHGDSEPLSREGKIISGNVNVKNQISREDLKEAFKKFGAVRYVDFSIGDNSGYLRFEDSKAAEKARMSAVLADGGLIIKDHIVTLEPVTGEAEKDYWDTIRSIQGKYKDSRSYKGRASNNQRGGKRFNAKRDRNPDSEKNSNKARKVEAIA

SEQ ID NO: 157 - DNA, 900 bp, Zea mays
gccccaaataatgattttattttgactgatagtgacctgttcgttgcaacaaattgatgagcaatgcttttttataatgccaactttgtacaaaaaagcaggcttaaacaatggaaaattcgacgctccacggaggaagctgccaacaaccaaacactcagctggatacggcttcgtgcctgcttgccccgctgccgccggtggtagccgagccacagccggagcagcagcatgcatgcaccgatgcgccgccgacgtctctcgcccctggcgcggcgatgagttgcccaccgccgccggctgccgtggactgggcgtcgctgcttctaccgcccagcacgtcgggcgcgagcgaggtcggctgcggtgtcagcgctgtaacgacggtggctgccggaagcaaagctggtgcgacggcgggagagggagataatagtaagaccgtaaaagctgggaagcagggcggcgggagagggaagaacaaggtgagccggccacggttcgcgttccagacgcggagcgagaacgacatcctcgacgacggctaccggtggaggaagtacgggcagaaggccgtcaagaacaccgcatttccaaggagctactaccggtgcacgcaccatacgtgcgacgtgaagaagcaggtgcagcggctggccaaggacacgagcatagtggtgaccacgtacgagggcgtgcacaaccacccgtgcgagaagctcatggaggcgctcagccccatcctcaaacagctccagctcctctctcagctccagtcttgcactaatcaactcctctgaacccagctttcttgtacaaagttggcattataagaaagcattgcttatcaatttgttgcaacgaacaggtcactatcagtcaaaataaaatcattatttg

SEQ ID NO: 158 - protein, 229 aa, Zea mays
MENSTLHGGSCQQPNTQLDTASCLLAPLPPVVAEPQPEQQHACTDAPPTSLAPGAAMSCPPPPAAVDWASLLLPPSTSGASEVGCGVSAVTTVAAGSKAGATAGEGDNSKTVKAGKQGGGRGKNKVSRPRFAFQTRSENDILDDGYRWRKYGQKAVKNTAFPRSYYRCTHHTCDVKKQVQRLAKDTSIVVTTYEGVHNHPCEKLMEALSPILKQLQLLSQLQSCTNQLL

SEQ ID NO: 159 - DNA, 894 bp, Zea mays
gatgagcaatgcttttttataatgccaactttgtacaaaaaagcaggcttaaacaatggcgctcctccttcgccgaggcgtggccctcgccgcccgctccttccgcgccgcggccgcctcctccgcttccaccactgtgcaccgcctcccagccggggcgtcccttgcgggcgccggggaattggctccggcgcagctcttcttcttcgagaaccgaagaggcttcgcgaaggggaagaaatcgaaggatgatcgaggtgacactgttcaagctgttcctgacattgggccaactgtcaaatcagctgccaccgcacaaatggacgctgcagtgatcgcactgtcacgagagctgagcaaactacggactggaagagctacacctggcatgcttgaccatatcatggtggagaatgcagatgttaaagttgcattgaatcgcattgccgttgtttctgtcctggacgcacataccctatcagtgatgccttatgatcctacttccatgaagtcgatcgagcatgctattatctcatcaccattgggcattaatccaacacctgatgggaataggattattgcagctatccctccgttgacaaaggagaacatacaggcactgtgcaaggttgttactaaatcagcggaggattttaaacaaagtattagaagagcacgccaaaaggcacttgatacaataaagaagtctgcatctagtatgcccaaggatgacgtaaagaggattgagaaggaggttgaagaattgaccaaaaagttcataaagtcgtcagatgatatgtgcaaggctaaggagaaggaaatcagcggaaactgaacccagctttcttgtacaaagttggcattataagaaagcattgcttatcaatttgttgc

SEQ ID NO: 160 - protein, 259 aa, Zea mays
MALLLRRGVALAARSFRAAAASSASTTVHRLPAGASLAGAGELAPAQLFFFENRRGFAKGKKSKDDRGDTVQAVPDIGPTVKSAATAQMDAAVIALSRELSKLRTGRATPGMLDHIMVENADVKVALNRIAVVSVLDAHTLSVMPYDPTSMKSIEHAIISSPLGINPTPDGNRIIAAIPPLTKENIQALCKVVTKSAEDFKQSIRRARQKALDTIKKSASSMPKDDVKRIEKEVEELTKKFIKSSDDMCKAKEKEISGN

SEQ ID NO: 161 - DNA, 783 bp, Zea mays
atggttgggctcctccgtccactctccgccgccgccaccttactcctcgcccccgccacgccactcactggttcctcagtctccgctagttccgtcggcggcaggcggtggagaagcgtgagggcggacgccggcgggggctggctatccgggctgctgggcggcaagggcggcggcgcgtccacggcgatgatggtgacgccgggaaccgtgaaggccggcgaccccgtcctgcacgagcccgcgcaggaggtggcgccgggggacgtgctgtccgagaaggtgcagggcgtcatcgaccggatggtcgacgtcatgcgcagggccccaggcgtcggcctcgccgccccgcagatcggcgtcccgctcaggattattgttctcgaggatacgcaggagtacatcagctatgcacccaagaaggacatcgaagcacaagaccgccgcccctttgatcttctcgtcattatcaatccaaagattaagagcacgagtaaaagaaccgcgctgttctttgagggatgtctcagtgttgatggatacagggcggtcgtggagcggcatctggacgttgaagtttcaggtctggaccggaatgggagcaccatgaaggtacgggcttcaggatggcaagcgcgcatcctccagcatgaatgtgatcatcttgaaggcacgctgtatgttgacaagatggtagcaaggacattcagggtcgtcgagaacttggatttgccccttcccactggatgccctcaactagggttcagtccacaagtacactag

SEQ ID NO: 162 - protein, 260 aa, Zea mays
MVGLLRPLSAAATLLLAPATPLTGSSVSASSVGGRRWRSVRADAGGGWLSGLLGGKGGGASTAMMVTPGTVKAGDPVLHEPAQEVAPGDVLSEKVQGVIDRMVDVMRRAPGVGLAAPQIGVPLRIIVLEDTQEYISYAPKKDIEAQDRRPFDLLVIINPKIKSTSKRTALFFEGCLSVDGYRAVVERHLDVEVSGLDRNGSTMKVRASGWQARILQHECDHLEGTLYVDKMVARTFRVVENLDLPLPTGCPQLGFSPQVH

SEQ ID NO: 163 - DNA, 853 bp, Zea mays
attttattttgactgatagtgacctgttcgttgcaacaaattgatgagcaatgcttttttataatgccaactttgtacaaaaaagcaggcttaaacaatggcgccgagaacgtcagagagagcgatgacatcggcggccgcggggctcgcgcgtggcgccggcccgcactacagaggcgtcaggaagcggccgtggggccggtacgccgcggagatccgcgacccggccaagaagagccgcgtgtggctcggcacgttcgacacgcccgaggacgccgcgcgggcctacgacgccgccgcgcgcgagtaccgcggcgccaaggccaagaccaacttctccttccctgcgtgcctgccgctcgccgccgcggacgtggccggcgcctgccggagcggcaacagcagcagcaccaccaccaccaccaccgtcgactccttcggcggcgacgtgcaggcgccgcccatgcaggccatgccgctcccaccgtccttctgcgccaccggcgccgtacgcttccctttcagcagctaccccgtgacgcacccgtattacttcttcgggcaggcggcagcagggtgccatatgctgaagctgccaccgacgacggtgactgtggctcagagcgactcagactcctcgtcggtcgaggatctgtcgccgtcgccgtcgccgtcgccgccggccgccgtgtcagcgacgagatccgccacgtttgatctcgacctcaactgcccaccgccggccgaggcggaggcatagacccagctttcttgtacaaagttggcattataagaaagcattgcttatcaatttgttgcaacgaacaggtcactatcagtcaaaataaaatca

SEQ ID NO: 164 - protein, 220 aa, Zea mays
MAPRTSERAMTSAAAGLARGAGPHYRGVRKRPWGRYAAEIRDPAKKSRVWLGTFDTPEDAARAYDAAAREYRGAKAKTNFSFPACLPLAAADVAGACRSGNSSSTTTTTTVDSFGGDVQAPPMQAMPLPPSFCATGAVRFPFSSYPVTHPYYFFGQAAAGCHMLKLPPTTVTVAQSDSDSSSVEDLSPSPSPSPPAAVSATRSATFDLDLNCPPPAEAEA

SEQ ID NO: 165 - DNA, 968 bp, Zea mays
tgcttttttataatgccaactttgtacaaaaaagcaggcttaaacaatgaggagggagcttgcctcccccttagctactgccgccgctgccacggccggtgcctcctcctcggctgccgcctcgctccggggctggtgggacgatgtcaacgagtcgccccagtggcaggacggggccttcttctccctcgccgccgcctacgccctcgtctccgccgtcgcactgattcagctcgtcaggatccagcgccgggtgcccgagttcggatggaccacgcagaaagtcttccacctcatgaacttccttgtcaatggggtccgtgctctggtgttcggcttccatgtccatgtcttcctccttcgcacaaaagtatacaagttggtgttgctagatctccccggcttgttgtttttctccacctacaccttgctcgtgctcttctgggcagaaatataccatcaggctaggagtctcccaacggacaagctaaggcctgcatacattgccgttaacgccatcatatacgttgttcagctttgcatatggatatacctcggaataaatgataatgccgcggttgagctggccagcaaaatattcattgtagctgtctcctttgttgcgcttcttgggttttcagtatatggtggaaggttgtttgtcttgctgagacgtttccctattgaatctaaggggcggcaaaagaagctgtatgaggttgggaccgtgacagcaatttgtgttacctgctttctgataagatgtgttgtggtcgcgctatctgcatttgatgctgatgtatctctcgaggttttggaccatccagtcctggatttcttctattatatgtttgcggagatactcccttctgcgctggttctcttcgtccttcggaagcttcctcccaagcgggtatcggcgcaatacccccctattaactagacccagctttcttgtacaaagttgg

SEQ ID NO: 166 - protein, 298 aa, Zea mays
MRRELASPLATAAAATAGASSSAAASLRGWWDDVNESPQWQDGAFFSLAAAYALVSAVALIQLVRIQRRVPEFGWTTQKVFHLMNFLVNGVRALVFGFHVHVFLLRTKVYKLVLLDLPGLLFFSTYTLLVLFWAEIYHQARSLPTDKLRPAYIAVNAIIYVVQLCIWIYLGINDNAAVELASKIFIVAVSFVALLGFSVYGGRLFVLLRRFPIESKGRQKKLYEVGTVTAICVTCFLIRCVVVALSAFDADVSLEVLDHPVLDFFYYMFAEILPSALVLFVLRKLPPKRVSAQYPPIN

SEQ ID NO: 167 - DNA, 4239 bp, Zea mays
atggcggcccccctgcactccagctccggccacaacgccgccgcaggcggcggggccaagaccatcgaggagatgtaccagaagaaaacgcagctggagcacatcctgctgcgccctgacacctacatcggctccgtggagaagcacacccaggcgctttggatatacgaggacggtgccatggtgaaccgctcggtcacctacgtccctggactctacaagatcttcgacgagatcctcgtcaacgccgccgacaacaagcagcgggatcccaagatggacgcgctccgcgtcgagattgacgtcgacagctgctgcatctccgtatacaacaacggcgacgggatccccgtcgaggtccaccaggaggagggcgtctacgtgccagagatgatattgggccacctcctcaccagtagcaactacaacgacaacgagaagaagaccaccggcgggaggaacggatacggcgccaaactcactaacatcttctccactgagttcgtcatcgagaccgccgatgggcgtcgccagaagaagtacaagcaggttttctatgagaacatggggaagaagtcagagccccagattaccaagtgcaagcagggcgagaactggaccagggtcactttcaagcctgatcttgccaagttcaacatgacccatctcgaagatgatgttgtagccctcatgaggaagagagttgttgatatggcaggcactctcggcaaaacggtgaaggtcgagttggatggccagagggtgcccataaagagcttctgtgactatgtcgacctgtatatgaagagtgctaactgcgacagacctgataatttcaaaaggatttatgagcaagtaaatgatcggtgggaagtgtgtgttagtcaaagtgaagggcaatttcagcaggtcagctttgtcaacagaattgcaaccatacgaggtggaagtcatgttgattatgttaccaaccaaattgccaaccatgtggtggccattgtgaataagaaaaacaagaatgcaaacatgaagctgcacaacgtgaagagccatctatgggtctttgttaatgcgctcattgacaatccggcttttgattcacaaaccaaggagaccttgaccactcgtcagggaagctttgggtcaaagtgtgagctttctagtgatttcctcaagaaagttgagaaatctggtgtaattgagaatgtcctctcttgggctgatttcaaacttagcaaagaattaaagaagactgatggaagcaaaaagtcaagaatttctggcatccctaagcttgaggatgcaaatgaagctggtgggaaggactctgacaagtgcactttgatcctgactgaaggcgactccgcaaaagcacttgctatgtctggcatagctgtcgtagggagagattactatggcgtatttcctctcaggggaaaactgttgaatgtcagagaggcaaaccacaagcaaataatggacaacgctgaaattcagcacataaagcaaatacttggtttgcagcatggaaagcagtatgagagcaccaaaggtttgagatatggtcatctcatgataatgacagatcaggatcatgatggctcccacattaaagggttgctgatcaacttcatccactcattctggccgtctcttcttaaagttccatcttttttggttgagttcattactccaatcatcaaggcaaccagaggtcaaactacgaaatcattttacacaatgccagagtatgaagaatggagaaagaatttaggagcaagtgcaagttcgtggactataaaatactacaaggggttggggacaagcacagccaaagaaggccggaagtactttgaagatattattgatcacaaaaaggattttgtctgggtagatgaccaagatggcaaccatattgagttagcattcagcaagaaacggattgctgataggaaacagtggcttacaaattttcagcctggaacatacatagaccaacgtgagaaacaagtcaagtatagtgatttcatcaacaaagagctgatactcttctcaatggcggacctgcagcgatcaataccttcaatggttgatggccttaaaccaggccagaggaagattctgttttgttcattcaagaggaattttgtcaaggaagctaaggtggctcagttctctggttatgtgtcagaacactccgcataccaccatggtgagcagagtttagcaagtacaattattggcatggcccagaattttgttggcagcaataacatcaaccttatgtcccctaatggtcagtttggcacaagagctcagggaggcaaggacgctgcaagtcctcggtatatcttcaccaagctgtctaatattacacgttcaattttcccgaaggatgacgatattcttcttaattatctgaatgaggatgggcagtcaattgaacccacctggtatatgccaatccttcccatggtattggtcaatggaagtgaaggaattggaactggatggagcacatatattccaaactacaatccaagagacattgttgctaacgtcaggcggttgttgaatgaagagtctactgtaccaatgcatccttggtataggggattcaaggggtctatagagaagacagtcaatacgaaggtagctggttccacgtataccgtcaccggaatcattgaggttgttgacaacactacactgaggatcactgagctgccaatccgccgatggactcaggattacaaagattttctcgaaagtttagctccagatcctaagaacaaggacaaagtaacattcatagaggatgtcacatcacaaggtgataatgaagacgtctacattcaactcaaattaagtgaggcaaatgtgaatgtagctaaggaagaaggactagtgaagaagtttaagttgacaacaacaattggtacaacaaacatgcacttgtttgattcagatggtaaaattcggaaatatgacactcctgagcaaatacttgaggaattctttcaattaaggcttgaattctattgtaagagaaaggaagcattgttgaagaatatcaagctggacttaaagaagcttgaaaacaaagttaggtttatccgctgtgttgttgataatgaaattatagttaacaacaggaaaagggcagatctatttttggagctccggcacaagaattttgaccctttcccaaagaaaaaaaagaaggctgaaccaactgctgtaggtgctatagaagaggaggaaaatgaagagtctcctgaaactgcagcaggagtggatcctagtgactatgagtatctcctctccatgtcaattggtaccttgactttggagaagatacaagagctcaatgctgagaaacaaaagttggtggacgatgttgtggaactgatgaacacatcgccaaaatcactttggttgaaagatcttgatgcttttgagaaagaactggatgtgcttgatcaaatggatctagcagaggaggtgcaaagggaaaagaggataaaggaaggcaaaaaaggcggatcaaaagctgcacccaagaaacaacctaaaaaggctgcacctataaagctggaaagcagtacagaagacaatgctgctgaaccagtagtcgcaaagcgtggagctcaacagaagaaagcacccaaaaaggctcccgtggacgaagaggaagttgatatgccttcactgaaagaccgtcttgctgcctttaatataaatgactcatctcctcctgatcactctgctatggaaactgaaacaacagaacagccggctcagaagaaagggagaggaaagaagcctgccgccgccgctgtgaagccgaaggctcctgccgccaggaaaagggcgccgactcaagggggcaaggcaacgcagaagaaaatagatgagatgctcaaggtcactgaggataacaccagcagtgctttgtcccctgagaagaaggtccggaagatgaggccctctcccttcaacaagaagagtggctcaatcttacagagaggctcgactgccgcttctgcaagctctgaaactatcgctgaagcttcaccaccctctggtagctctgaagagccagttgctgcagcaaaacctagaaggacagccagggctacgaagaaacatgtctatattagtgaaagcgatcctgaggatgaagtggtggagttgagtgatgattcggactttgatttggatgctgactctgactag

SEQ ID NO: 168 - protein, 1412 aa, Zea mays
MAAPLHSSSGHNAAAGGGAKTIEEMYQKKTQLEHILLRPDTYIGSVEKHTQALWIYEDGAMVNRSVTYVPGLYKIFDEILVNAADNKQRDPKMDALRVEIDVDSCCISVYNNGDGIPVEVHQEEGVYVPEMILGHLLTSSNYNDNEKKTTGGRNGYGAKLTNIFSTEFVIETADGRRQKKYKQVFYENMGKKSEPQITKCKQGENWTRVTFKPDLAKFNMTHLEDDVVALMRKRVVDMAGTLGKTVKVELDGQRVPIKSFCDYVDLYMKSANCDRPDNFKRIYEQVNDRWEVCVSQSEGQFQQVSFVNRIATIRGGSHVDYVTNQIANHVVAIVNKKNKNANMKLHNVKSHLWVFVNALIDNPAFDSQTKETLTTRQGSFGSKCELSSDFLKKVEKSGVIENVLSWADFKLSKELKKTDGSKKSRISGIPKLEDANEAGGKDSDKCTLILTEGDSAKALAMSGIAVVGRDYYGVFPLRGKLLNVREANHKQIMDNAEIQHIKQILGLQHGKQYESTKGLRYGHLMIMTDQDHDGSHIKGLLINFIHSFWPSLLKVPSFLVEFITPIIKATRGQTTKSFYTMPEYEEWRKNLGASASSWTIKYYKGLGTSTAKEGRKYFEDIIDHKKDFVWVDDQDGNHIELAFSKKRIADRKQWLTNFQPGTYIDQREKQVKYSDFINKELILFSMADLQRSIPSMVDGLKPGQRKILFCSFKRNFVKEAKVAQFSGYVSEHSAYHHGEQSLASTIIGMAQNFVGSNNINLMSPNGQFGTRAQGGKDAASPRYIFTKLSNITRSIFPKDDDILLNYLNEDGQSIEPTWYMPILPMVLVNGSEGIGTGWSTYIPNYNPRDIVANVRRLLNEESTVPMHPWYRGFKGSIEKTVNTKVAGSTYTVTGIIEVVDNTTLRITELPIRRWTQDYKDFLESLAPDPKNKDKVTFIEDVTSQGDNEDVYIQLKLSEANVNVAKEEGLVKKFKLTTTIGTTNMHLFDSDGKIRKYDTPEQILEEFFQLRLEFYCKRKEALLKNIKLDLKKLENKVRFIRCVVDNEIIVNNRKRADLFLELRHKNFDPFPKKKKKAEPTAVGAIEEEENEESPETAAGVDPSDYEYLLSMSIGTLTLEKIQELNAEKQKLVDDVVELMNTSPKSLWLKDLDAFEKELDVLDQMDLAEEVQREKRIKEGKKGGSKAAPKKQPKKAAPIKLESSTEDNAAEPVVAKRGAQQKKAPKKAPVDEEEVDMPSLKDRLAAFNINDSSPPDHSAMETETTEQPAQKKGRGKKPAAAAVKPKAPAARKRAPTQGGKATQKKIDEMLKVTEDNTSSALSPEKKVRKMRPSPFNKKSGSILQRGSTAASASSETIAEASPPSGSSEEPVAAAKPRRTARATKKHVYISESDPEDEVVELSDDSDFDLDADSD

SEQ ID NO: 169 - DNA, 735 bp, Zea mays
gccccaaataatgattttattttgactgatagtgacctgttcgttgcaacaaattgatgagcaatgcttttttataatgccaactttgtacaaaaaagcaggcttaaacaatgtgccgtttgaccgactggttggttccgttccgttctgttccgcagatgaacaaggagaggctcatgaagatggccggcgccgtccgcaccggcggcaagggcaccatgcgcaggaagaagaaggctgtacacaagacggtcaccacggacgacaagaggctgcagggcactctcaagagagtaggggtcaacaccatccctgcaatcgaggaggtgaacatattcaaggacgatctcgtcatccagttcttgaaccccaaagtgcaagcttccgtcgcagcaaacacatgggtggtcagtggatctccacagacgaaaaagctacaggatgttctccctgggatcattaaccagcttggccctgacaacatggagcacctgaagaggattgccgaggagatgcagaagcaggtggctgctgccggtgcggcagcacaggtcaaggaagacaacgatgacgatgttccagagcttgttcctggagagacttttgaagaagtagctcaggagacaaaagcctgaacccagctttcttgtacaaagttggcattataagaaagcattgcttatcaatttgttgcaacgaacaggtcactatcagtcaaaataaaatcattatttg

SEQ ID NO: 170 - protein, 174 aa, Zea mays
MCRLTDWLVPFRSVPQMNKERLMKMAGAVRTGGKGTMRRKKKAVHKTVTTDDKRLQGTLKRVGVNTIPAIEEVNIFKDDLVIQFLNPKVQASVAANTWVVSGSPQTKKLQDVLPGIINQLGPDNMEHLKRIAEEMQKQVAAAGAAAQVKEDNDDDVPELVPGETFEEVAQETKA

SEQ ID NO: 171 - DNA, 1068 bp, Zea mays
gtgacctgttcgttgcaacaaattgatgagcaatgcttttttataatgccaactttgtacaaaaaagcaggcttaaacaatggacatcgacctcttccccgacatcgaccttgacgccctcctcgcctccttctccggcgaccccgccgccgtctccggcctcatcatcccgtccccgcctccgccggcgccggcgacggcgcacgatgcggaggcggggtcgccggagtcggtgacctcccggacgaacccgctcggggaggtggcgctctcggagatcgagaggctcctgatgcaggagggggaggcggaactgggcggggaggtcgatgggatcagcgtggaccagttcttcgacgcgctgtacgacggcgaggaggcgaaaggtgagcgggaggcgggggcaagcgcggatgtggactccggcagggacgatgtgctggaagtcgtgacgccagaggcggggacggtggaggcggatggcgatgatcccatcagcaagaagaagatgaggcaaatgaggaacagagattccgccatgaaatccagggagaggaagaagtcgtacataaaggacttggagacaaagagcaagcacttggaggcagagtgccgtcgcctcagctacgcacttcagtgctacgcagctgaaaacatggcactgcgccagagcttgctgaaggataggcctcttggtgctcccacagccacgcaggagtctgccgtactcacggaaaccctgccgctggtttccctgctttggctggtgagcatcgtctgcctgttcctgatgcccgttctgcccaaccgaagcccagctgctccaagcagcggcggaagagacctcgtgatggcagccggaaagacaagcagtgagaccccagagatactggaactcatcctccatggaaggcgttgcaagagcacgagggcgaagattaagctatgtattttaccatttcatgcaggagctgcttgctagaccagctttcttgtacaaagttggcattataagaaagcattgcttatcaatttgttgcaacgaacaggtcactatcagtcaaaata

SEQ ID NO: 172 - protein, 300 aa, Zea mays
MDIDLFPDIDLDALLASFSGDPAAVSGLIIPSPPPPAPATAHDAEAGSPESVTSRTNPLGEVALSEIERLLMQEGEAELGGEVDGISVDQFFDALYDGEEAKGEREAGASADVDSGRDDVLEVVTPEAGTVEADGDDPISKKKMRQMRNRDSAMKSRERKKSYIKDLETKSKHLEAECRRLSYALQCYAAENMALRQSLLKDRPLGAPTATQESAVLTETLPLVSLLWLVSIVCLFLMPVLPNRSPAAPSSGGRDLVMAAGKTSSETPEILELILHGRRCKSTRAKIKLCILPFHAGAAC

SEQ ID NO: 173 - DNA, 1284 bp, Zea mays
atgcaacacgaagaagtgtgcgatactactacctgcggtgaaggcaatggtcgaggaggtgaggaagaactcgagatggaggggcactcgttgatgaggatgaagaggagggatcacttgctgctcactgacggcgccggcgccggcgccggggcggggcctcttgcggtgcagacgccgatggagcccatggagttcctgtcgcggtcgtggagcgtgtcggcgtcggagatctccaaggtgctggctggcggcgtcggcgggaggcggagctccaacttcgtcgtcgaccgcctgtccgggatgctcatgccggagacgctcgcgctcgcagcctcctcctcctccgccggcaccaacaacatcagcccccgcaagcgcaccctcaggagcaggagcgcgatctccgcgcaccaggtccaccacacggtccacgcgatcggcaagtggttccaccactgggacgcgggcagcagcaaggtggacaaggcccgcgccgagcgggcgcgcgtgcacgccgcggtctccgtggcgagcgtggcggccgcggtcgccgccgtggccgtggccgcgggcgcgagccccgaggtggacgtcaccgacgacggcgccaggatggggagcgcgctggcgtccgcgacgcagctgctggcgtcgcactgcgtcgaggccgccgagctcgcgggggccgaccacgaccaggtggcgtccgccgtggagaccgcggtcgacgtgcggagcccaggggatctgctcaccctcaccgccgcagcggccacagctctcagaggggccgcggcgatgcggcacagggcgcagcgggaggcgaggagcagggcggccgtagcgccgtacgacaaggcctgcagctaccgcgcggacgtctggtgcaaggaaggcgcgctcctcaaacgcaaccgcaaaggcgctctgcactggaagcaggtggccgtgtacatcagcaagaagtcgcaggtgatagtgaagctgaagagcaagcacatcggcggcgccttctccaagaagaagaaaggcgtcgtctacggcgtctacgacgacatcccggcgtggccggcgcgcgagggcgtcgccgcgcaaagctcggcgccggagacgtgccacttcgggctgaggacggcgcatggcctgctcgagttccagtgcgaaagcagggcacagaggcgggactgggtggaggcggtgaaggacctgatccggcaggtggccggcgggactgctctgctcgagcactccttcgagtcgctaaggctgagcgcgtcttga

SEQ ID NO: 174 - protein, 427 aa, Zea mays
MQHEEVCDTTTCGEGNGRGGEEELEMEGHSLMRMKRRDHLLLTDGAGAGAGAGPLAVQTPMEPMEFLSRSWSVSASEISKVLAGGVGGRRSSNFVVDRLSGMLMPETLALAASSSSAGTNNISPRKRTLRSRSAISAHQVHHTVHAIGKWFHHWDAGSSKVDKARAERARVHAAVSVASVAAAVAAVAVAAGASPEVDVTDDGARMGSALASATQLLASHCVEAAELAGADHDQVASAVETAVDVRSPGDLLTLTAAAATALRGAAAMRHRAQREARSRAAVAPYDKACSYRADVWCKEGALLKRNRKGALHWKQVAVYISKKSQVIVKLKSKHIGGAFSKKKKGVVYGVYDDIPAWPAREGVAAQSSAPETCHFGLRTAHGLLEFQCESRAQRRDWVEAVKDLIRQVAGGTALLEHSFESLRLSAS

SEQ ID NO: 175 - DNA, 1466 bp, Zea mays
ccccaaataatgattttattttgactgatagtgacctgttcgttgcaacaaattgatgagcaatgcttttttataatgccaactttgtacaaaaaagcaggcttaaacaatgttcggccgcgcgccgaagaagagcgacaacacccggtactacgagatcctgggggtttccaaggacgcgtcacaggatgacctcaagaaggcctaccgcaaggccgccatcaagaaccaccccgacaagggcggcgaccccgagaagttcaaggagctagctcaggcttatgaggtcctcagcgaccctgaaaagagagagatctatgaccagtatggcgaggatgccctcaaggagggaatgggaggcggtggtgggatgcatgatccctttgacatattccagtcattctttggtggtggaagcccttttggaggtggcagcagtaggggcagaaggcaacgacggggagatgatgtggttcatcctctgaaggtttctctggaggatttgtacaatggcacatcaaagaagctctctctgtcccgcaatgtcctctgctccaagtgcaatggtaagggttccaagtctggagcttcgtcgaggtgtgctggttgtcaaggttctggcttcaaggtccaaatccggcagttgggacctggaatgattcagcaaatgcaacatccttgcaatgagtgcaagggttccggagagaccatcagcgataaggatagatgcccacaatgcaaaggtgataaagttgtgccggagaagaaagttcttgaagtggtagttgagaaaggtatgcagaatgggcagaagatcacattccctggcgaagctgatgaagcgcctgatactgccactggagatatcatctttgttctccagcagaaggagcatcccaagttcaagagaaagggcgatgacctcttctacgagcacacactgatcttgactgaatctctgtgtggcttccagtttgttctgactcacttggataacaggcagctgctgatcaaatcgaaccccggcgaagttgtgaagcctgattctttcaaggcaatcaacgatgaaggcatgcccatgtatcagaggcccttcatgaagggcaagctgtacatccacttctcggtggagttcccggactcgttgagcccggagcagtgcaagaccctggaggctgttctcccgctcaagccagtatcacagtacactgatatggagctggacgagtgcgaggagacaatgccatacgacgtgaacatcgaagaggagatgcggaggcggcagcagcagcaccaggaggcctacgatgaggatgatgatgtgccaggcggtgggcagagggtgcagtgcgcccagcagtagacccagctttcttgtacaaagttggcattataagaaagcattgcttatcaatttgttgcaacgaacaggtcactatcagtcaaaataaaatcattatttgcca

SEQ ID NO: 176 - protein, 417 aa, Zea mays
MFGRAPKKSDNTRYYEILGVSKDASQDDLKKAYRKAAIKNHPDKGGDPEKFKELAQAYEVLSDPEKREIYDQYGEDALKEGMGGGGGMHDPFDIFQSFFGGGSPFGGGSSRGRRQRRGDDVVHPLKVSLEDLYNGTSKKLSLSRNVLCSKCNGKGSKSGASSRCAGCQGSGFKVQIRQLGPGMIQQMQHPCNECKGSGETISDKDRCPQCKGDKVVPEKKVLEVVVEKGMQNGQKITFPGEADEAPDTATGDIIFVLQQKEHPKFKRKGDDLFYEHTLILTESLCGFQFVLTHLDNRQLLIKSNPGEVVKPDSFKAINDEGMPMYQRPFMKGKLYIHFSVEFPDSLSPEQCKTLEAVLPLKPVSQYTDMELDECEETMPYDVNIEEEMRRRQQQHQEAYDEDDDVPGGGQRVQCAQQ

SEQ ID NO: 177 - DNA, 1115 bp, Zea mays
tttattttgactgatagtgacctgttcgttgcaacaaattgatgagcaatgcttttttataatgccaactttgtacaaaaaagcaggcttaaacaatgggctgctgcctccaccgccgcctctgcctcggcggcacgggtaccctgccgttcgtcaggcggttcacggccaaggaggtggaggccgccacgcgcggcttcaccgcggtgctcgacgccgccggcacggcctacagggcgcgcttcgccggcggcctcgtcgccaccgtcgtcaggcgccgccgcgacgccgacgacaacgacgaccaccatcgccagggagagggaggaggaggagggaccacggacgccttctacctggagcagcagctgctggcccgcctcaaccaccgccacgtcgtcaggctgcgcggcttcgcgctagcccaccacgcaaggttcctcgtcttcgatcacatggagaacaggagcctcaaggaatgcctccacgatccgctccggacgccgctggactggcggaccaggctgcaggtcgccattgacgtcgcggcagcactggaatacctctactaccactgcgaccccccggtgttccacgtgtccgtcaactccggcaccgtgctcatggacaccaacttcgtcgccaagctatcggatgtcggcgtggtcagccacgacgtgaggctcgccaccactgactccttccaagaccgggtcgagcggaggcgggcgggcctggcgttccagtacggcgtgctggtgctggagctggtgacggggcagtccccgggcgccgacggcgagctcgtgcgctgggcgcaggaccccggctccgccgcctccgtgcaccggatggtggacgccgacctcggcggcgtctacgacgcccgcgagctccgcgacctcgtcgccgtcgccaggctctgcaccagggacagggacgacagggacgagggcgctggcgtcgtcaccattccgcagatcgtcaggtacctccaggggaagctggagcggatcggatgccaggccaggttcggatgaacccagctttcttgtacaaagttggcattataagaaagcagtgcttatcagtttgtggcaaggaactggtcacga

SEQ ID NO: 178 - protein, 314 aa, Zea mays
MGCCLHRRLCLGGTGTLPFVRRFTAKEVEAATRGFTAVLDAAGTAYRARFAGGLVATVVRRRRDADDNDDHHRQGEGGGGGTTDAFYLEQQLLARLNHRHVVRLRGFALAHHARFLVFDHMENRSLKECLHDPLRTPLDWRTRLQVAIDVAAALEYLYYHCDPPVFHVSVNSGTVLMDTNFVAKLSDVGVVSHDVRLATTDSFQDRVERRRAGLAFQYGVLVLELVTGQSPGADGELVRWAQDPGSAASVHRMVDADLGGVYDARELRDLVAVARLCTRDRDDRDEGAGVVTIPQIVRYLQGKLERIGCQARFG

SEQ ID NO: 179 - DNA, 2313 bp, Zea mays
aataatgattttattttgactgatagtgacctgttcgttgcaacaaattgatgagcaatgcttttttataatgccaactttgtacaaaaaagcaggcttaaacaatgagtagtgctgtgaaggaccagctacagcagatgtcgacgacgtgcgattctctcctgttggagctcaacgtgatttgggatgaggtcggtgagcccgacatggcgagggaccggatgctgctggagctcgagcaggagtgcctcgacgtctacaagagaaaggtcgaccaggccaatcgatgcagggcccagttgcggcaggccattgcggaggcagaggccgagctcgctggcatatgctcggccatgggcgagccaccgatacatgttagacagtcaaatcagaagttacaaggtttaagggaagtattgaatgcgattgtcccatacttggaggagatgagaaagaagaaagttgaaagatgggaccaatttgttgatgtgatcgagcaaattaagaaggttgcatctgaaatcaggcctgcagattttgtaccctttagaattcctgtggatcagtctgatctgtcattaagaaagctggaggagctaacgaaagagctgcaatcccttcagaaggagaagagtgatcggctgaagcaagtcatggaacatcttaacactttgcattcgttatgcgaggtgcttggtgtagacttcaaacaaacagtaaatgaggtgcaccctagcctgggtgaggctgatggatcaaagaacctaagcaactgtacaattgaaagccttgcatcagctgcaagcagactgcgtgaattgaaagtccagaggatgcaaaagcttcaagatttggcctctagcatgcttgaactttggaatctcatggatacaccacttgaagaacagcagatgttccagaatgtaacgtgcaatattgctgcttctgaacatgaaataactgagcctaacacgctctctattgacttcctcagctacgtggaatctgaagttttaagactcgagcaacttaaagcgagcaagatgaaagaccttgttctaaaaaagaagacagaactggaagagcataggagacgtgctcatttgattggcgaggaaggctatgcagctgaatttagcgatgaggctattgaggcaggagctgttgatccttcgctggtgctggaacaaattgaggctcacattgccacagtgaaagaggaagcctttagcaggaaggatattctcgagaaggttgaaagatggttgaatgcatgtgaggaggaagcttggctggaagattacaacaaagatgacaatcgttataatgccgggaggggggcccacttgacactcaaaagggctgagaaagctcgtattttggttaacaagatcccgggactggtagatgttttaaccacaaaaattgtagcctgggaggcagaaagaggaaaggaattcacatacgacggtgtccgccttatgtcaatgcttgaagagtacatgatcgttcgccaggagaaagagctacagaagaagaggcaaagggatcagaagaaaatccaggatcaactcaaagctgagcaggaagcgctctatggatcaaaaccaagtccttctaagcctcaaagcacgaagaaggcgcctaggcactccatgggtggtgcgaaccgaagactgtctcttggtggagccactatgcaagcccccaaaacagatatactgcactccaagacagctcgtgccgccaagaaggctgaagatttgggcgctttatctcctagtagtagaggcttggacattgccggtcttcccatcaagaagttatctttcaacgcaagcactttgcgagaggcagaaacaccgcgcaagccttttgcccagatcatgccaggaaacaccgtctcaccgatgcctacgcggcccatctccagcgccacagaggaagagaacaaaacccccaggacatttgtaggagggctcaatgcgaaaacgccggcgacagtgacggctcctatgcagatggcgatgacaccagccgtggctaacaaggtcatagccactcctgcaacccttttccaggagaaggcagattcgccagcactgccagcggacatcgagtactcgttcgaagagaggcggctcgctgtttacctggccaggcaagtggcttaaacccagctttcttgtacaaagtggtccccaggcaagtggcttaaacccagctttcttgtacaaagttggcattataagaaagcattgcttatcaatttgttgcaacgaacaggtcactatcagtcaaaataaaatcatt

SEQ ID NO: 180 - protein, 689 aa, Zea mays
MSSAVKDQLQQMSTTCDSLLLELNVIWDEVGEPDMARDRMLLELEQECLDVYKRKVDQANRCRAQLRQAIAEAEAELAGICSAMGEPPIHVRQSNQKLQGLREVLNAIVPYLEEMRKKKVERWDQFVDVIEQIKKVASEIRPADFVPFRIPVDQSDLSLRKLEELTKELQSLQKEKSDRLKQVMEHLNTLHSLCEVLGVDFKQTVNEVHPSLGEADGSKNLSNCTIESLASAASRLRELKVQRMQKLQDLASSMLELWNLMDTPLEEQQMFQNVTCNIAASEHEITEPNTLSIDFLSYVESEVLRLEQLKASKMKDLVLKKKTELEEHRRRAHLIGEEGYAAEFSDEAIEAGAVDPSLVLEQIEAHIATVKEEAFSRKDILEKVERWLNACEEEAWLEDYNKDDNRYNAGRGAHLTLKRAEKARILVNKIPGLVDVLTTKIVAWEAERGKEFTYDGVRLMSMLEEYMIVRQEKELQKKRQRDQKKIQDQLKAEQEALYGSKPSPSKPQSTKKAPRHSMGGANRRLSLGGATMQAPKTDILHSKTARAAKKAEDLGALSPSSRGLDIAGLPIKKLSFNASTLREAETPRKPFAQIMPGNTVSPMPTRPISSATEEENKTPRTFVGGLNAKTPATVTAPMQMAMTPAVANKVIATPATLFQEKADSPALPADIEYSFEERRLAVYLARQVA

SEQ ID NO: 181 - DNA, 1233 bp, Zea mays
ggccccaaataatgattttattttgactgatagtgacctgttcgttgcaacaaattgatgagcaatgcttttttataatgccaactttgtacaaaaaagcaggcttaaacaatggtggtggtgctcgccaacccgcctgtcgtggaccagatcccgctcctgcggtccccgggccccagggacagcttctcgtgcgtgccggtcgtcgacctgtccggccccggcgcggcgcgcgcgatcgtcgacgcctgcgagcgcttcggcttcttcaaggtcgtcaaccacggcgtgcccgcggccaccatggacgtggccgagtccgaggccgtcggcttcttcgcgcaggcgcaggccgacaaggaccgcgcgggcccccgcgcgtcgtacccgttcggctacggcagcaagcggatcggcctcaatggcgacatggggtggctcgagtacctcctcctcgccgtcgactccgcgtcgctctccgacgcctgccccgtcccatccggcgccgcgttccggagcgcgctgaacgagtacgtcgcggccgtgcgggacgtcgcggcgcgcgtgctggaggcgatggcggagggcctgggcatcgcggacgcggccgcgctcagctcgatggtgaccggcgccggcagcgaccaggtgttccgcgtcaaccactacccgccctgccccgcgctgcagggcctgggctgcaccgccaccgccacgggcttcggcgagcacaccgacccgcagatcatctccgtgctccgctccaacggcacgtccggcctgcaggtcgcgctccgcgacgccgcgcaggcgcagcagtgggtgtccgtgccctccgaccgcgacgccttcttcgttaacgtcggcgactcgttgcaggtgctgaccaacgggaggttcgagagcgtgaagcaccgggtggtgaccaacagcctcaagtccagggtttccttcatctacttcgcgggaccggcgctggagcagcggatcgcgccgctggcgcagctgctggcggagggcgaggagagcctgtacagggagttcacgtggggcgagtacaagacggccgcgtacaagacgaggctcggcgacaacaggctggcccagtttcagaggtgtagcatctaaacccagctttcttgtacaaagttggcattataagaaagcattgcttatcaatttgttgcaacgaacaggtcactatcagtcaaaataaaatcattatttgccatc

SEQ ID NO: 182 - protein, 338 aa, Zea mays
MVVVLANPPVVDQIPLLRSPGPRDSFSCVPVVDLSGPGAARAIVDACERFGFFKVVNHGVPAATMDVAESEAVGFFAQAQADKDRAGPRASYPFGYGSKRIGLNGDMGWLEYLLLAVDSASLSDACPVPSGAAFRSALNEYVAAVRDVAARVLEAMAEGLGIADAAALSSMVTGAGSDQVFRVNHYPPCPALQGLGCTATATGFGEHTDPQIISVLRSNGTSGLQVALRDAAQAQQWVSVPSDRDAFFVNVGDSLQVLTNGRFESVKHRVVTNSLKSRVSFIYFAGPALEQRIAPLAQLLAEGEESLYREFTWGEYKTAAYKTRLGDNRLAQFQRCSI

SEQ ID NO: 183 - DNA, 1238 bp, Zea mays
gttgcacaaattgatgagcaatgcttttttataatgccaactttgtacaaaaaagcaggcttaaacaatgtctaccgtcttcatgacccaactgccgcgtactctccgtctaatggagggagagcaggatcagggactctttccggcgtcgaccttccatgtcgcaaaggaccctccaatcttgttcccgttcatgatcaccagccccgtccatgtagatcagctccaagggcaaagcagctatggtgatcagcacttggggcagcatgtcttgtctgaatctactcaacagttcaccgatcggacgatgataagtgggtcagaagtcttccctaggcggccatcgccgttcgggcagactatccaaagcatcgatggtgatatgatccagccatctgcgtatgatccatatgatatagtggagaaccagcgcacggaaggattgagcggcggcggctggacagtgtcgtcgtcctcgtcgtcaccgccggcgaagatgaagatcatgcgcaaggcgacgagcgagtatcccgagggtggagctgcaagaaagccaaggagaagagcccaagcgcaccaagacgagagccagctactgacgatgcagcagcaggctatgggcgtcgtcgttagagtgtgctccgactgcaacaccacaaagacccccttgtggaggagtggtcctcgtggccccaagtctctctgcaacgcatgtggcataaggcaaaggaaggcgaggcgggcgatggtggccgcggccgcggcagctgctgccagcaacggaggcgcgcctccacaagcggtgagcggcgttgccacccagcagcagccgaagccgaagccggccaggaaggagaagaggtcggacgccgccgaccggtcgctgccgttcaagaagcggtgcaagatggtggttgtcgatcacgctgccggtgcagcggcagccacggcgacgccagaggccgcagctgctcggagtaccaaggatcaagcggatcacgtctccggcgacaagcaggttgttgcccctgccgccgcgatgaggagtctggatcagagcgagatcgccactcctcctccctcggcggtgtcgtcgtttcatgctgctttcccggccgacgagatcaccgacgccgccatgctgctcatgaccctgtcctgtggtctcgtccgcagctagatccagctttcttgtacaaagttggcattataagaaagcattgcttatcaatttgttg

SEQ ID NO: 184 - protein, 361 aa, Zea mays
MSTVFMTQLPRTLRLMEGEQDQGLFPASTFHVAKDPPILFPFMITSPVHVDQLQGQSSYGDQHLGQHVLSESTQQFTDRTMISGSEVFPRRPSPFGQTIQSIDGDMIQPSAYDPYDIVENQRTEGLSGGGWTVSSSSSSPPAKMKIMRKATSEYPEGGAARKPRRRAQAHQDESQLLTMQQQAMGVVVRVCSDCNTTKTPLWRSGPRGPKSLCNACGIRQRKARRAMVAAAAAAAASNGGAPPQAVSGVATQQQPKPKPARKEKRSDAADRSLPFKKRCKMVVVDHAAGAAAATATPEAAAARSTKDQADHVSGDKQVVAPGRRDEESGSERDRHFLLPRRCRRFMLLSRPTRSPTPPCCS

SEQ ID NO: 185 - DNA, 1503 bp, Zea mays
atgagttcctccccgtcctttggtctcctggccttagcagcagtactcctagcactgaacttagcacaacatggctccctcgccgcaaccgtcggccccagggtcatcgtcgtcggcgccggcatgtctgggatctcggcggcgaagaggctgtcggaggccgggataaccgacctgctgattctggaagcgacggaccacatcggcgggcggatgcacaagacgaacttcgccggcatcaacgtcgagttaggcgccaactgggtggagggcgtgaacggcggcaagatgaaccccatctggcccatcgtcaactccaccctcaagctccgcaacttccgctccgacttcgactacctcgctcagaacgtctacaaggaggacggtggcgtctacgatgaagattacgtccagaagagaattgaactggcggacagcgtggaagagatgggggagaagctctctgccactttgcacgccagtggcagagacgacatgtctatccttgccatgcagcgcctcaacgaacaccagccgaacgggccggcgacgccggtggacatggtggtggactactacaagttcgactacgagttcgcggagccgccgcgcgtgaccagcctgcagaacaccgtgcctctcgcgaccttcagcgacttcggcgacgacgtctacttcgtcgccgaccagcggggctacgaggccgtcgtctactacctcgccggccagtacctcaagaccgacgataagtctggaaagatcgtcgacccgcgcctgcagctcaacaaggtggtgcgagagatcaagtattccccgggtggcgtcaccgtcaagacagaggacaactcggtgtacagcgcagactacgtcatggtttctgcgagcctgggtgtcctgcaatccgatctcattcagttcaagcccaagctacctacatggaaggttagggcgatctaccaattcgacatggccgtgtacaccaagatcttcctcaagttccccaggaagttctggcctgaagggaaaggaagggagttcttcctctacgccagcagcaggagaggttactacggagtgtggcaggagttcgagaagcagtaccctgacgccaatgtcctcctggtcaccgtgaccgacgaggagtcgaggcgcatcgagcagcagtcggacgagcagaccaaggcggagatcatgcaggtgctgcggaagatgttccccggcaaggacgtcccggacgccaccgacatccttgtcccgaggtggtggtccgacaggttctacaagggcaccttctccaactggccagttggcgtcaaccgctacgaatacgaccagcttagggcaccggttgggagggtatacttcaccggcgagcacaccagcgagcactacaatggctatgtccatggagcctatctttcaggtatcgactccgctgaaattctcatcaactgcgcccagaaaaagatgtgcaagtaccatgtccagggaaagtatgactag

SEQ ID NO: 186 - protein, 500 aa, Zea mays
MSSSPSFGLLALAAVLLALNLAQHGSLAATVGPRVIVVGAGMSGISAAKRLSEAGITDLLILEATDHIGGRMHKTNFAGINVELGANWVEGVNGGKMNPIWPIVNSTLKLRNFRSDFDYLAQNVYKEDGGVYDEDYVQKRIELADSVEEMGEKLSATLHASGRDDMSILAMQRLNEHQPNGPATPVDMVVDYYKFDYEFAEPPRVTSLQNTVPLATFSDFGDDVYFVADQRGYEAVVYYLAGQYLKTDDKSGKIVDPRLQLNKVVREIKYSPGGVTVKTEDNSVYSADYVMVSASLGVLQSDLIQFKPKLPTWKVRAIYQFDMAVYTKIFLKFPRKFWPEGKGREFFLYASSRRGYYGVWQEFEKQYPDANVLLVTVTDEESRRIEQQSDEQTKAEIMQVLRKMFPGKDVPDATDILVPRWWSDRFYKGTFSNWPVGVNRYEYDQLRAPVGRVYFTGEHTSEHYNGYVHGAYLSGIDSAEILINCAQKKMCKYHVQGKYD

SEQ ID NO: 187 - DNA, 661 bp, Zea mays
ttgactgatagtgacctgttcgttgcaacaaattgatgagcaatgcttttttataatgccaactttgtacaaaaaagcaggcttaaacaatggacgcggtgatgttcgggctggagactcccctgatggccgcgctgcagcacctgctggacgtgcccgacggcgacgccggcgcgggcggcgacaacaagacgggcagcggcggcagcgccacgcgcacctacgtccgcgacgcgcgcgccatggcggccaccccggccgacgtgaaggagctgcccggcgcgtacgcgttcgtggtggacatgccggggctgggcacgggcgacatccgggtgcaggtggaggacgagcgggtgctggtggtcagcggcgagcggcgccgggaggagcgcgaggacgacgccaagtacctgcgcatggagcggcggatgggcaagttcatgcgcaagttcgtgctgccggacaacgccgacgtcgacaaggtcgccgccgtgtgcagggacggcgtgctcacggtgaccgtcgagaagctgcccccgccggagcccaagaagcccaagaccatcgaggtcaaggtcgcctgaacccagctttcttgtacaaagttggcattataagaaagcattgcttatcaatttgttgcaacgaacaggtcactatc

SEQ ID NO: 188 - protein, 164 aa, Zea mays
MDAVMFGLETPLMAALQHLLDVPDGDAGAGGDNKTGSGGSATRTYVRDARAMAATPADVKELPGAYAFVVDMPGLGTGDIRVQVEDERVLVVSGERRREEREDDAKYLRMERRMGKFMRKFVLPDNADVDKVAAVCRDGVLTVTVEKLPPPEPKKPKTIEVKVA

SEQ ID NO: 189 - DNA, 882 bp, Zea mays
atggacgcgcccttcttccacgagctcaggcggcaggcctcctcctacctgaccggcaagatccgctccgcgcggctggcgctcaccgacgtcaccccgacgcagctcttgacggaggaggcgacgaacggggacgcgtcgccgccgaacgtcaggacgatggggcgcatagcccggcaggcgttcgacgtcgacgagtacgtcaggatcacgggcgtcctgcacgggcgcctcgcgagcttcgaccgcaggcagtggcgggaggcgtacaaggcgctgctcctcctcgagcacctcctcacgcacgggccccgcagcgtcgcggcggagttccacaaggacagggaggccatcgaccggatggccaccttccaacacgtcgacgagaaaggcttcaactggggcctgacggtgaggagcaagtcggagcgcgtgctcaagctgctggagcgcggcccgttcctggaggaggagcgcgagcgggcgcgcaagatcgcgcgcgagatcacgggcttcggcagcttcagcctcagcgcaggcgcctcccaccacgccgtgtcgcagtcgcagccacccggtgacgacgggaaccgcggcgacggccggagcagctccaagcgcgaggagcggcagaggcacgacgacggcggccgattcgggcggagccactcgcagttcgaggagcggtggtggaagcacaaggacggtgacgacggcgacaaggagaatctgatacagagcccggagccgacagcacgggtcgcgccgcgggaagtggatgcggaggcggaggaggaggagctgcaccaccaccagctccatccgttccacgggttggggcaaaaacagcggccggaggcgacgctgctcctgagccagtga

SEQ ID NO: 190 - protein, 293 aa, Zea mays
MDAPFFHELRRQASSYLTGKIRSARLALTDVTPTQLLTEEATNGDASPPNVRTMGRIARQAFDVDEYVRITGVLHGRLASFDRRQWREAYKALLLLEHLLTHGPRSVAAEFHKDREAIDRMATFQHVDEKGFNWGLTVRSKSERVLKLLERGPFLEEERERARKIAREITGFGSFSLSAGASHHAVSQSQPPGDDGNRGDGRSSSKREERQRHDDGGRFGRSHSQFEERWWKHKDGDDGDKENLIQSPEPTARVAPREVDAEAEEEELHHHQLHPFHGLGQKQRPEATLLLSQ

SEQ ID NO: 191 - DNA, 1353 bp, Zea mays
atgcgccgtgtcgggacgggtgtgaggatgctttgcggcgcggcgctgtcggtgcttctgcttctcgcgggcggcgcggcggcgtcgcactcgcgctcgtcgtgccccgccacgcctccggacgcggggaacacgctgcaggtgtcgcacgcgttcgggccgtgctcgccgctgggccccgggacggcggcgccgtcgtgggcggggttcctggcggaccaggcgtcgcgtgacgcgtcgcggctgctgtacctggactcgctggcggtgcgtggccgcgcccgcgcgtacgcgcccatcgcgtcggggcggcagctgctgcagacgccgacgtacgtggtgcgggccagcctcggcacgccgccgcagcagctgctcctggccgtcgacaccagcaacgacgcctcgtggatcccttgcgccggctgcgcgggctgccccacgtcgtccgcggcgcccttcgacccggcctcgtccgcctcgtaccgcacggtgccctgcgggtcgccgctctgcgcgcaggcacccaacgcggcgtgcccgcccggcggcaaggcctgcggcttcagcctcacctacgccgactcctcgctgcaggccgcgctgtcgcaggactctctcgccgtcgccggcaacgccgtgaaggcctacaccttcgggtgcctgcagagggccactggcacggctgcgccgccgcaggggctgctggggctcggccgcggcccgctgtcgttcctttcgcagaccaaggacatgtacgaggccaccttctcgtactgtctccccagcttcaagtcgctcaacttctctggaacgctccggctcgggcgcaacggccagccgcagcgcatcaagacgacgccgctgctggccaacccgcaccggtcgtcgctctactacgtgaacatgaccggcatccgcgtgggcaggaaggtggtgcctatcccggcgttcgacccggcgacgggggcgggcaccgtgctggactctggcaccatgttcacccggctggtggcgccggcgtacgtggccgtgcgggacgaggtccggcgccgcgtcggcgcgcccgtgtcctcgctgggagggttcgacacgtgcttcaacaccaccgccgtcgcgtggccgcccgtgacgctgctgttcgacggcatgcaggtgacgctgccggaggagaacgtggtcatccacagcacgtacgggaccatcagctgcctggccatggccgcggcgcccgacggcgtcaacaccgtgctcaacgtcatcgccagcatgcagcagcagaaccaccgtgtgctcttcgacgtgcccaacggacgcgtaggcttcgcgcgcgagcgctgcaccgccgcttga

SEQ ID NO: 192 - protein, 450 aa, Zea mays
MRRVGTGVRMLCGAALSVLLLLAGGAAASHSRSSCPATPPDAGNTLQVSHAFGPCSPLGPGTAAPSWAGFLADQASRDASRLLYLDSLAVRGRARAYAPIASGRQLLQTPTYVVRASLGTPPQQLLLAVDTSNDASWIPCAGCAGCPTSSAAPFDPASSASYRTVPCGSPLCAQAPNAACPPGGKACGFSLTYADSSLQAALSQDSLAVAGNAVKAYTFGCLQRATGTAAPPQGLLGLGRGPLSFLSQTKDMYEATFSYCLPSFKSLNFSGTLRLGRNGQPQRIKTTPLLANPHRSSLYYVNMTGIRVGRKVVPIPAFDPATGAGTVLDSGTMFTRLVAPAYVAVRDEVRRRVGAPVSSLGGFDTCFNTTAVAWPPVTLLFDGMQVTLPEENVVIHSTYGTISCLAMAAAPDGVNTVLNVIASMQQQNHRVLFDVPNGRVGFARERCTAA

SEQ ID NO: 193 - DNA, 519 bp, Zea mays
atggccatggcggcagcggacggcaagagccggaggttcgcgctggcctgcggggtgctgagccagtacgtcaaggccgagcagcagcagcagcagcagatggcggccccgcgcgccccggccaccacgaccctgagcctgatgcccggcgcggacgtcggcgccgacgagcagcaggaggcggccgccgctggggccgaggagatgcccgggcccgcccccgccgcggcgccgccgctcaccatcttctacggcggcagggtggtggtgttcgaggacttcccggcggagaaggcggccgaggtcatgcgcctcgcggccggcgacgacctgcccatcgcccggaaggcgtcgctgcagcggttcctggccaagcgcaaagatcgcctcgtcgagcgcgcgccctacgcccgcccgtcgtcccccgcggaggcggtcaagccggcctcgggctcggcctcggcctcctggctcgggctccgcagcacggaagccgaccgcctcaccatcgcgctgtga

SEQ ID NO: 194 - protein, 172 aa, Zea mays
MAMAAADGKSRRFALACGVLSQYVKAEQQQQQQMAAPRAPATTTLSLMPGADVGADEQQEAAAAGAEEMPGPAPAAAPPLTIFYGGRVVVFEDFPAEKAAEVMRLAAGDDLPIARKASLQRFLAKRKDRLVERAPYARPSSPAEAVKPASGSASASWLGLRSTEADRLTIAL

SEQ ID NO: 195 - DNA, 484 bp, Zea mays
gactgatagtgacctgttcgttgcaacaaattgatgagcaatgcttttttataatgccaactttgtacaaaaaagcaggcttaaacaatggcggccgcggcggaggtgtaccggcgggtgctgaaggcggtgcagaagcacgtcggtaggggcgccaccaagcagcgcttcctcgacttcggggcggccgagttccgtgcccccgtcggcacggaggccgacgctagggcgaggctgcggctcgccggggactacgcctacctcctcaccagcgtccaccaccacaaggatctgctgctctcgtacaatatagctgtggatcgatctgatgaaacgaagaagatactgaacaaatctgccgccagtgtaggcctccagcttcctgatgtctacaagccatgaacccagctttcttgtacaaagttggcattataagaaagcattgcttatcaatttgttgcaacgaacaggtcactatcagtca

SEQ ID NO: 196 - protein, 104 aa, Zea mays
MAAAAEVYRRVLKAVQKHVGRGATKQRFLDFGAAEFRAPVGTEADARARLRLAGDYAYLLTSVHHHKDLLLSYNIAVDRSDETKKILNKSAASVGLQLPDVYKP

SEQ ID NO: 197 - DNA, 789 bp, Zea mays
atggactcaggttacaatccccggacggtggaggaggtgttccgggacttcaagggccgtcgtgccgggataatccgcgcgctcaccactgatgcggaggatttcttcaagcaatgcgacccggaaaaagaaaacttgtgcctgtatgggtttcctaatgagagctgggaagtaaatttgcctgctgaagaggtgccacctgacctcccagaaccagcattaggcataaactttgcaagagatggaatgcaggaaaaagagtggttgtccatggttgctgcacacagtgatgcatggttactttctgttgcattttacttcggtgctcgattcggtttcaataaaaatgacaggaagcgcctctacagtttgattgatgatcttcccatggcttttgaaattgttagtgggaagagtgaaaccaaggcaccagcaccaccaagcagtagtaaccacagcaatatcaaaccgaagtctaacaacaaaaagaaaccaccggagcctaaggtgaagcagccaaagccgcgtgcccctgcagaggaaggcgaggaggaagatggcagtgcaagcgagggcgagcacggggagacgctgtgcggcgcgtgcaaggaaagctacggccccgacgagttttggatctgctgcgacctctgcgagaagtggttccacggcaagtgcgtcaagatcacggcggccaaggccgagcacatcaagcagtacaagtgcccgtcctgcaccggcggcggtggcgtcagcaacagcggcaccaagcgagcccgcccatcatag

SEQ ID NO: 198 - protein, 262 aa, Zea mays
MDSGYNPRTVEEVFRDFKGRRAGIIRALTTDAEDFFKQCDPEKENLCLYGFPNESWEVNLPAEEVPPDLPEPALGINFARDGMQEKEWLSMVAAHSDAWLLSVAFYFGARFGFNKNDRKRLYSLIDDLPMAFEIVSGKSETKAPAPPSSSNHSNIKPKSNNKKKPPEPKVKQPKPRAPAEEGEEEDGSASEGEHGETLCGACKESYGPDEFWICCDLCEKWFHGKCVKITAAKAEHIKQYKCPSCTGGGGVSNSGTKRARPS

SEQ ID NO: 199 - DNA, 789 bp, Zea mays
ttattttgactgatagtgacctgttcgttgcaacaaattgatgagcaatgcttttttataatgccaactttgtacaaaaaagcaggcttaaacaatggcctccttgaaggaccactgtgccgtggtggcagttgtagtggcgatctgcttcgtcgtcctcgccgccgccctcccttcgcacgcgtcgacggcggtggacgagccggcgaagtataagcccagcagagcgccagcgccgtcccctgcatctgcatcatcctacgtcccgccgccggtccagcccgtgatcgtcgtccagggcgtcatctactgcaagtcctgcaagctcaggggctacaacagcggcatggacgcgtcccctctccccaatgcgacggcgagcctggtgtgctacggcgacgcggagagcaagtaccgggtgctgaaccagacgagcacggccaccgacacgaacggctacttcatcgtgatggtgtacgacgtgggcatgttcgaccgccgcagctgcaggctgtacctccgctcctcgccgacggcgctctgcgccgcgcccttcatcccgtccaaccccaagctggggctcaccctcgtgagggaccgcgcggccacggcgcccaggggcgcgcgcggcatcttccaccccaagactgcgctcatgtacgcgccgggcaccggcggcaagtgcccgccgtactgaacccagctttcttgtacaaagttggcattataagaaagcattgcttatcaatttgttgcaacgaacaggtcactatcagtcaaaataaaatc

SEQ ID NO: 200 - protein, 200 aa, Zea mays
MASLKDHCAVVAVVVAICFVVLAAALPSHASTAVDEPAKYKPSRAPAPSPASASSYVPPPVQPVIVVQGVIYCKSCKLRGYNSGMDASPLPNATASLVCYGDAESKYRVLNQTSTATDTNGYFIVMVYDVGMFDRRSCRLYLRSSPTALCAAPFIPSNPKLGLTLVRDRAATAPRGARGIFHPKTALMYAPGTGGKCPPY

SEQ ID NO: 201 - DNA, 1455 bp, Zea mays
atgacgacgacgaccacggcgaagcagctccggcgcgtgcgcacgctcggccgcggcgcgtcgggcgccgtggtgtggctggcctccgacgaggcctcgggcgagctggtggcggtcaagtcggcgcgcgccgccggggccgcggcgcagctgcagcgcgagggccgcgtcctccggggcctctcgtcgccgcacatcgtgccctgcctcggctcccgcgccgcggcgggcggcgagtaccagctcctgctggagttcgcgccgggcgggtcgctggccgacgaggccgccaggagcggcgggggccgcctcgcggagcgcgccatcggcgcctacgccggggacgtggcgcgcgggctggcgtacctccacggccggtcgctcgtgcacggggacgtcaaggcccggaacgtggtcatcggcggcgacgggcgcgccaggctgaccgacttcgggtgcgcgaggccggccggcgggtcgacgcgccccgtcgggggcaccccggcgttcatggcgcccgaggtggcgcgcggccaggagcagggccccgccgccgacgtctgggcgctcgggtgcatggtcgtcgagctggccacgggccgcgcgccctggagcgacgtggagggcgacgacctcctcgccgcgctccaccggatcgggtacacggacgacgtgccggaggtgcccgcgtggctgtcgcccgaggccaaggacttcctggccggctgcttcgagcgccgcgccgccgcccggcccacggccgcgcagctcgcggcgcacccgttcgtcgtcgcctccgcctccgccgccgccgccatccgcggcccggcgaagcaggaggtggtcccgtcacccaagagcacgctgcacgacgcgttctgggactcggacgccgaggacgaagcggacgagatgtcgacgggcgcggcggccgagaggatcggggcattggcgtgcgccgcctccgcgctgcctgactgggacaccgaggaaggctggatcgacctccaggacgaccactcggccggaactgccgacgcaccgccggcgcccgtcgcggactacttcatcagctgggcggagccgtcagacgcagagctggaaccattcgtcgccgtcgccgccgccgcaggtctcccgcacgttgcaggagtggcattagcaggcgccaccgccgttaacctgcagggcagttattattattacccgcctatgcatctaggcgtccgcggaaacgagattccacgcccgttgttggatcatcatggcgacgggttagaaaaggggcagggatcccaccgcgtttgtaacagagaaacagaaaaggatgtcaacgccgagatcctcgatcttcggtggggagatccgatgcgttgcagcagccttcccctttttcgtgacggacggatggccacctcgccgtcgccggcccctgatgcctcacgcgcgatgtga

SEQ ID NO: 202 - protein, 484 aa, Zea mays
MTTTTTAKQLRRVRTLGRGASGAVVWLASDEASGELVAVKSARAAGAAAQLQREGRVLRGLSSPHIVPCLGSRAAAGGEYQLLLEFAPGGSLADEAARSGGGRLAERAIGAYAGDVARGLAYLHGRSLVHGDVKARNVVIGGDGRARLTDFGCARPAGGSTRPVGGTPAFMAPEVARGQEQGPAADVWALGCMVVELATGRAPWSDVEGDDLLAALHRIGYTDDVPEVPAWLSPEAKDFLAGCFERRAAARPTAAQLAAHPFVVASASAAAAIRGPAKQEVVPSPKSTLHDAFWDSDAEDEADEMSTGAAAERIGALACAASALPDWDTEEGWIDLQDDHSAGTADAPPAPVADYFISWAEPSDAELEPFVAVAAAAGLPHVAGVALAGATAVNLQGSYYYYPPMHLGVRGNEIPRPLLDHHGDGLEKGQGSHRVCNRETEKDVNAEILDLRWGDPMRCSSLPLFRDGRMATSPSPAPDASRAM

SEQ ID NO: 203 - DNA, 900 bp, Zea mays
caaattgatgagcaatgcttttttataatgccaactttgtacaaaaaagcaggcttaaacaatggaaatgggcgacaacttcgagtgctactgggagatgcagcattacctggagtcagaggagctcagcctctacatgggcacccaggacgatgccctgtcctgctacgactccagctcgccggatggctccttctccaactcgccctgggcgccggcgggcgtggcggccacggcgtccgagaagcgtgagggccccggcggcgcggcggccgcgaacaagaacatcctcatggagcgcgaccgccggcgcaagctcaacgagaagctctacgcgctgcgcagcgtcgtgcccaacatcacaaagatggacaaggcgtcgatcatcaaggacgcgattgagtacatcgagcatctgcaggcggaggagcggcgggcactgcaggcgctcgaggccggcgagggggcgcgctgcggcgccggcggccacgggcacggcgaggaggcgcgcgtgcttctgcagcagcccgccgccgccgccgccccggcgcccgtggaggtcctggagctgcgcgtgtcggaggtgggcgaccgcgtgctggtggtgaacgtgacgtgcagcaagggccgcgacgccatggcccgcgtgtgccgcgccgtcgaggagctccggccccgcgtcatcaccgccagcgtcacctccgtcgccggctgcctcatgcacaccatcttcgtcgaggtggattcggaccagacgaatcgtatccagatcaagcacgtgatcgaggccgctctcgcccagctagatgatgcctccgcgggcccgccgagcgtgatgagctactattagacccagctttcttgtacaaagttggcattataagaaagcattgcttatca

SEQ ID NO: 204 - protein, 262 aa, Zea mays
MEMGDNFECYWEMQHYLESEELSLYMGTQDDALSCYDSSSPDGSFSNSPWAPAGVAATASEKREGPGGAAAANKNILMERDRRRKLNEKLYALRSVVPNITKMDKASIIKDAIEYIEHLQAEERRALQALEAGEGARCGAGGHGHGEEARVLLQQPAAAAAPAPVEVLELRVSEVGDRVLVVNVTCSKGRDAMARVCRAVEELRPRVITASVTSVAGCLMHTIFVEVDSDQTNRIQIKHVIEAALAQLDDASAGPPSVMSYY

SEQ ID NO: 205 - DNA, 1038 bp, Zea mays
gttgcaacaaattgatgagcaatgcttttttataatgccaactttgtacaaaaaagcaggcttaaacaatgatggggtggggagaggaggtggtggctctgtccctgcgaggctacggctatggcaacgaggaggacgaccggccggagaagccgcggcggtacggggtgacggagatgcggagccccttctactccttccgccccgcaaaccaggcgctccaggaaatattggattctcttagtccattcgttgatggtttgaagttctctggcggatgccatagtttgatgggaaaggagttggttagagagatcactgatctagcacacaggcatgacatttatgtgagcacaggtgattgggcagagcatttgctgcgccaaggaccctcttctttcaagcaatatgtagaggaatgcaaggccttagggtttgacacaattgagctgaatgctgggtctctcaacttccctgaagaggctctgttgagactagtccgcctcatcaagagtagtggtttaagggcaaagccaatgttttcggtgaagtttgacagttctgatattcctgcgtctggtgatagggcctttggggcttacatagctccagtcaaagggaagacctcagaaagagttgaagatgttgacctgctgattaggagggcagagagatgcttggaagcaggcgctgatatgatcatgatcgatgctgatgatgtttgccagcgtgctgaatctctgaggacagacaacatcgccaagattgtaggccggctcgggcttgataaaaccatgtttgaagcttccaactccaacacctcggagtggttcgtcagacgttatggcccaagggtaaatctctttgttgaacactctgacgtgatgaatctggagcgcctccggggcttcaacatgcgcagaagcaactcggcctcccgttttgcctcgccgttcttcctgatctaaacccagctttcttgtacaaagttggcattataagaaagcattgcttatcaatttgttgcaacgaacaggt

SEQ ID NO: 206 - protein, 299 aa, Zea mays
MMGWGEEVVALSLRGYGYGNEEDDRPEKPRRYGVTEMRSPFYSFRPANQALQEILDSLSPFVDGLKFSGGCHSLMGKELVREITDLAHRHDIYVSTGDWAEHLLRQGPSSFKQYVEECKALGFDTIELNAGSLNFPEEALLRLVRLIKSSGLRAKPMFSVKFDSSDIPASGDRAFGAYIAPVKGKTSERVEDVDLLIRRAERCLEAGADMIMIDADDVCQRAESLRTDNIAKIVGRLGLDKTMFEASNSNTSEWFVRRYGPRVNLFVEHSDVMNLERLRGFNMRRSNSASRFASPFFLI

SEQ ID NO: 207 - DNA, 652 bp, Zea mays
tgcttttttataatgccaactttgtacaaaaaagcaggcttaaacaatgtgtgatctggtggcccgcacgggccggcacctgcagcgctacgagaacggccgtcgccttgtggccgggtgcataccattcagatatagggatattaatgatggagcttctgatgatgaacaaaagaaacttgttgaagttctcatgatcagctcccaaagtggaccgggtcttctatttccaaagggaggctgggagaatgatgaaactgttgaagaggcagctgcaagggaagctatcgaagaagctggagtgcgaggagatttagtgcaactgctggggttctacgatttcaagagcaagcagcccgaagcaacgtgcagagccgcaatcttcgccctgcacgtgaaggaagagctagcctcctggccagaacagagcacccggcagaggagctggctcaccgttcccgaggcggcggagcggagccgctacccgtggatgcaggaggccctcgtgacaggcttctccgcctggctcgagaactggagaaacggtggtggcggcggcggcggctgcgtggaccgaactgagagatgaacccagctttcttgtacaaagttggcattataagaaagcattgcttatcaatttgttgcaacg

SEQ ID NO: 208 - protein, 180 aa, Zea mays
MCDLVARTGRHLQRYENGRRLVAGCIPFRYRDINDGASDDEQKKLVEVLMISSQSGPGLLFPKGGWENDETVEEAAAREAIEEAGVRGDLVQLLGFYDFKSKQPEATCRAAIFALHVKEELASWPEQSTRQRSWLTVPEAAERSRYPWMQEALVTGFSAWLENWRNGGGGGGGCVDRTER

SEQ ID NO: 209 - DNA, 1198 bp, Zea mays
gggggttgatgtgactggttcgttgcacaaattgatgagcaatgcttttttataatgccaactttgtacaaaaaagcaggcttaaacaatggcgcagaaggagaccaatggcagcaacggcgagcacatctccacccgcccgccgccgaccccgtcgccccttcgcttctccaagttcttccaggctaacctgcggatcctggtcactggtggggcgggcttcatcggctcgcacctcgtggacaggctcatggagaacgagaagcacgaggtcattgttgctgataactttttcaccggttcaaaagataacctgaagaagtggatcggacacccaagatttgagctcatccgccatgatgtcaccgagccacttcttgtggaggttgaccagatctatcaccttgcttgccctgcttcaccaatcttctacaagcacaatcctgttaagaccatcaagacaaatgttattggtaccctgaacatgctgggacttgcaaagagagttggagctaggattttgttgacatcaacatctgaagtttatggtgatccgcttgagcatcctcaaaccgaggcctactggggcaatgttaacccaattggagtcaggagttgttatgatgagggtaagcgtgtagcagagacgctgatgttcgactatcacaggcagcatggcattgaaatccgaattgccaggattttcaacacctatgggccaaggatgaacattgacgatggtcgtgttgttagcaacttcattgctcaggctgtgcgtggcgaaccccttactgtccagaagccaggaacacagactaggagcttctgctatgtcgccgatatggttgatggtcttattaggctgatgaatggaaacaacactggaccgattaacttggggaacccaggtgaattcaccatgctggaacttgctgagaatgtgaaggagttgattaacccagatataacagtgacgatgaccgagaacactcctgatgatccccgccagaggaagccggacatcaccaaggcaaaggaagttctagggtgggagcccaagatcgtcctgaaggacggcttggtgctcatggaggatgatttccgggagcgcctggccgtgcccaagaaaaccaaggcctaaacccagctttcttgtacaaagttggcattataagaaagcattgcttatcaatttgtt

SEQ ID NO: 210 - protein, 350 aa, Zea mays
MAQKETNGSNGEHISTRPPPTPSPLRFSKFFQANLRILVTGGAGFIGSHLVDRLMENEKHEVIVADNFFTGSKDNLKKWIGHPRFELIRHDVTEPLLVEVDQIYHLACPASPIFYKHNPVKTIKTNVIGTLNMLGLAKRVGARILLTSTSEVYGDPLEHPQTEAYWGNVNPIGVRSCYDEGKRVAETLMFDYHRQHGIEIRIARIFNTYGPRMNIDDGRVVSNFIAQAVRGEPLTVQKPGTQTRSFCYVADMVDGLIRLMNGNNTGPINLGNPGEFTMLELAENVKELINPDITVTMTENTPDDPRQRKPDITKAKEVLGWEPKIVLKDGLVLMEDDFRERLAVPKKTKA

SEQ ID NO: 211 - DNA, 1577 bp, Zea mays
gcgttcaccgacaaacaacagataaaacgaaaggcccagtcttccgactgagcctttcgttttatttgatgcctggcagttccctactctcgcgttaacgctagcatggatgttttcccagtcacgacgttgtaaaacgacggccagtcttaagctcgggccccaaataatgattttattttgactgatagtgacctgttcgttgcaacaaattgatgagcaatgcttttttataatgccaactttgtacaaaaaagcaggcttaaacaatggaggcggcagcgtcagccgagtacgggtactacggcggaggcgcgggcccacacgagacgaagaccgccgggtgcggggaccacttcgtcgtggacgacctcctcgcgctgccgccgtacgacgacgaggaggagggggcgacaggcgagaccccgctgtgcctgcagcctgtcaaggaggaggagggcggcctcgggaatttctcggccgactcgtccatcgtcgtcacagcaatcgacagctgcagcaactccttctctaggctagccgacgacgacttcccgggggaattctacgagccgtacgaccaactggtggagctagaatggctatcaaactacatgggcgagggcgaggaaactttcgcggcggaggacctggagaagctgaagctcatttccggtgggttctccccggcggctgtgaacgtgtcagcaccagctccagtgggcgtagcttcagccgcctctgcgacacagtccggtatgttcctgccggtcccggcaaaggcccgtagcaagcggtcccgcgcagctccgggcaactggtcgtcacggttggtcgtgctcccgccgaccccggcctcaccaccggcccctgcagcgtccatggccatttcgccctcggagtccggcatctcggcgcagcaggcgttccgcgccaagaagccgccgccgtcgaagaagaaagacgcggcggcaccggcaccggcaccggcagaagggcgacggtgcgtgcactgcgacacggacaagacgccgcagtggaggacggggcccatgggccccaagacgctgtgcaacgcgtgcggggtgcggtacaagtcggggcggctggtgccggagtacaggcccgcggcgagccccaccttcgtgatgtccaagcactccaactcccaccgaaaggtgctggagctgcgccgccagaaggaggtggtagtgcagcagccgccgcacgtgatgggcggcgccggcggtcctgcaggcgggctgatgcgcatgcagagcgcgatgctgttggacgggccggtggcggcggtgtcgtcgtcgtcccccatcgtcggcggcgacgagtttttgatccaccagcacttagggacggcagactaccggcagcgcatctaaacccagctttcttgtacaaagttggcattataagaaagcattgcttatcaatttgttgcaacgaacaggtcactatcagtcaaaataaaatcattatttgccatccagctgatatcccctatagtgagtcgtattacatggtcatagctgtttcctggcagctctggcccgtgtctcaaa

SEQ ID NO: 212 - protein, 375 aa, Zea mays
MEAAASAEYGYYGGGAGPHETKTAGCGDHFVVDDLLALPPYDDEEEGATGETPLCLQPVKEEEGGLGNFSADSSIVVTAIDSCSNSFSRLADDDFPGEFYEPYDQLVELEWLSNYMGEGEETFAAEDLEKLKLISGGFSPAAVNVSAPAPVGVASAASATQSGMFLPVPAKARSKRSRAAPGNWSSRLVVLPPTPASPPAPAASMAISPSESGISAQQAFRAKKPPPSKKKDAAAPAPAPAEGRRCVHCDTDKTPQWRTGPMGPKTLCNACGVRYKSGRLVPEYRPAASPTFVMSKHSNSHRKVLELRRQKEVVVQQPPHVMGGAGGPAGGLMRMQSAMLLDGPVAAVSSSSPIVGGDEFLIHQHLGTADYRQRI

SEQ ID NO: 213 - DNA, 2032 bp, Zea mays
gattttattttgactgatagtgacctgttcgttgcaacaaattgatgagcaatgcttttttataatgccaactttgtacaaaaaagcaggcttaaacaatgtctgcgaacgacggcgccggcgacacgaagatgagggcgatcgtcgtcgtagaggaaggggagatgagcgcgccggcggcgacgccgaagcagggcaagtgctgcgagtacacgctggacggctccgtcgacatgaagggccggccggcggtcaaggggaaatcaggagggtggcttgccggtgctctaatcctcgtgaaccagggcctggcgacgctggctttcttcggcgtgaacgtgaacctggtgctgttcctgacccgggtgctggggcagagcaatggcgacgccgccaacaacgtcagcaagtggacgggcaccgtgtacatgttctccctcatcggcgccttcctcagcgactcctactggggacgctacaagacctgcgccatcttcccggccatctttgtcctcggcctcgcgctgctgtcggtgtcgtcgcacctctacctaatcaggccggacgggtgcggcatggagcacgcgccctgcggcccgcactccggtaaggagctggggatcttctacatcgcgctgtacatgatcgccttcggcaacggcgggtaccagcccaacatcgccaccctgggcgccgaccagttcgacgaggaggaccccgccgaggcgcactccaaggtctccttcttcagctacttctacctcgccctcaacctcggctcgctcttctccaacaccttcctcagctacctcgaggacaagggcagctgggcgctcggcttctgggcctccaccgccgccgccgccacagcgctcctgcttttcctcagcggcacgctccggtaccgctatttccagcccggagggaacccgatcggaaggattggccaggtcgccatcgccgcgtgcaggaactggaaggcgggcgtgtcgaccgaagtggtaagcctgtacgagggcgacgagaaggcggatgccggtggcaggaagcttctgcacacgcaagggttcagtttcttggaccgcgcggcgcacgcggacactgactccaagctcggcgcgcgcgatccctggaagctgtgctcggtgacgcaggtggaggaggtcaagagcatcctgaggctcctccccatctggctctgcaccatcctctactccgttgtcttcacccagatggcctcgctctttgtcgtgcagggcgccgcgatgcgccgcaccaccccgttctccggcttctccgtcccgccctccagcatgtcggccttcgacattctcacagtcgccgccacgattttcctgtaccgccgcactatctgcccgttcctagcgcggctcagcggccgcccggctggccccaccgagctgcagaggatgggcctcggcctggtcgtgggtgccctggccatgaccacggccgggacggtcgagcacttccggaaggccagggccaccgcagcgatgagcagcgacctgcatatcatgtggcaggtgccgcagtatgcgctgatcggcgtgtcggaggtgatgatgtacgtcgggcagctcgagttcttcaacggccagatgcccgacgggctcaaaagcttcgggagcgcgctgtgcatgatgtccatgtcgctcggcaactacttcagtgacatcatcgtgagcgcggtgaccaggctcaccacgacgcgagggcggtccgggtggatcccggctgacctcaacgaggggcacctcgacaagttctacttcctgctcgccgtgctggccgtcgcggacttcgcggtgtacctcgtatgcgcgagccgctacgggagcggcaaagtggacgggaggagcagcgacgacgaggaggagggagcggccggtcaggtgacatccccggcttacgcatgaacccagctttcttgtacaaagttggcattataagaaagcattgcttatcaatttgttgcaacgaacaggtcactatcagtcaaaataaaatc

SEQ ID NO: 214 - protein, 613 aa, Zea mays
MSANDGAGDTKMRAIVVVEEGEMSAPAATPKQGKCCEYTLDGSVDMKGRPAVKGKSGGWLAGALILVNQGLATLAFFGVNVNLVLFLTRVLGQSNGDAANNVSKWTGTVYMFSLIGAFLSDSYWGRYKTCAIFPAIFVLGLALLSVSSHLYLIRPDGCGMEHAPCGPHSGKELGIFYIALYMIAFGNGGYQPNIATLGADQFDEEDPAEAHSKVSFFSYFYLALNLGSLFSNTFLSYLEDKGSWALGFWASTAAAATALLLFLSGTLRYRYFQPGGNPIGRIGQVAIAACRNWKAGVSTEVVSLYEGDEKADAGGRKLLHTQGFSFLDRAAHADTDSKLGARDPWKLCSVTQVEEVKSILRLLPIWLCTILYSVVFTQMASLFVVQGAAMRRTTPFSGFSVPPSSMSAFDILTVAATIFLYRRTICPFLARLSGRPAGPTELQRMGLGLVVGALAMTTAGTVEHFRKARATAAMSSDLHIMWQVPQYALIGVSEVMMYVGQLEFFNGQMPDGLKSFGSALCMMSMSLGNYFSDIIVSAVTRLTTTRGRSGWIPADLNEGHLDKFYFLLAVLAVADFAVYLVCASRYGSGKVDGRSSDDEEEGAAGQVTSPAYA

SEQ ID NO: 215 - DNA, 1817 bp, Zea mays
tgcaacaaattgatgagcaatgcttttttataatgccaactttgtacaaaaaagcaggcttaaacaatggaggcggaggcggaggcgacgtcgtcgggacggtggtgcacgtggaacctcgcggcggtggccgcggcgggtgcgtgtctgctcctgatgcacgtggcggcgcgggtggcggacgcgctctggtggcgcccgcaccggctggaggcgcacttcgcgcgacagggcgtgcgcgggccgccgtaccgcttcctcctgggctgcgtgagggagatggtcgcgctcatggcggaggccaccgcgaagcccatgtcgccgccggactcgcacgacgcgctcccgcgggtgctcgggttctaccactactggaggaagatctacggaccgatgttcttgatatggttcgggccgacgccgcggctcacggtggcggacccggagctggtcagcgaggtcctcctcacacgcgctgacgcgttcgaccgctacgaggcgcaccccgtcgtccggaagctcgagggagacggcctcgtcagtctccacgacgacaagtgggcgctccaccgccgcgtcctcaccccggccttctaccccgacaacctcaaccggctggcaccgcacgtcgccaggtcggtggtggcgctggcggagaggtggcgggccatggcctccgccgcgggaggcgaggtggaggtggacgtcgcggagtggtaccaggccgtcgccgaggaggccatcacgcgcgctacgttcggcagcagctacgactccggccgcgtcgtgttccgcatgcaggcgcgcctcatggccttcgcctccgaggccttccgcaaggtcttcgtccctgggtacaggttcttgccgaccaagaagaaccggctgcagtggagcctggacagggagatcaggcggggactcgtcacgctcatcggccaccgcagcgacgaggccgcgcaagacgatgactcggagctgaacgacaagggaagcagcaacggcttccgggacctgctggggctcatgatcaatgccagcgacaagaaggaggagaagaagcaggaggaggcgcgggcgatgcccgtggaggacatgctggaggagtgcaagacgttcttcttcgccggcaagcagacgaccaccaacctgctcacctgggccacagtgctcctggccatgcacccggactggcaggagcgtgctcgccaggaagtcctcgccgtgtgcggcgccgacgagctcccgtccaaggagcacctccccaagctcaaaacgctagggatgatcctgaacgagacgctccgcctgtacccgccggcggtggccacgatccgccgcgcgaagcgcgacgtgacgctcggcggcgtgtccatcccgcgggacaccgagctgctgatcccgatcatggcgatgcaccacgacggcgcgctctggggccccgacgccacgcagttcaaccccgcccggttcggcggcggcgcggccaaggtggcggcccacccgctggcgttcatccccttcgggctcggcccgcggatgtgcatcgggcagaacctggcgctgctcgaggcgaagctcacgctggcggtcgtgctccagcggttccggctcgcacggtcgcccagctacgtgcacgcgccgacggtcctgatgctgctctacccgcagtacggcgcgccggtgatctttcggccggtgtcgtcgcagctatccgtttcagaccggacggagacgacgagaccaccacggcactgaacccagctttcttgtacaaagttggcattataagaaagcattgcttatcaatttgttgc

SEQ ID NO: 216 - protein, 563 aa, Zea mays
MEAEAEATSSGRWCTWNLAAVAAAGACLLLMHVAARVADALWWRPHRLEAHFARQGVRGPPYRFLLGCVREMVALMAEATAKPMSPPDSHDALPRVLGFYHYWRKIYGPMFLIWFGPTPRLTVADPELVSEVLLTRADAFDRYEAHPVVRKLEGDGLVSLHDDKWALHRRVLTPAFYPDNLNRLAPHVARSVVALAERWRAMASAAGGEVEVDVAEWYQAVAEEAITRATFGSSYDSGRVVFRMQARLMAFASEAFRKVFVPGYRFLPTKKNRLQWSLDREIRRGLVTLIGHRSDEAAQDDDSELNDKGSSNGFRDLLGLMINASDKKEEKKQEEARAMPVEDMLEECKTFFFAGKQTTTNLLTWATVLLAMHPDWQERARQEVLAVCGADELPSKEHLPKLKTLGMILNETLRLYPPAVATIRRAKRDVTLGGVSIPRDTELLIPIMAMHHDGALWGPDATQFNPARFGGGAAKVAAHPLAFIPFGLGPRMCIGQNLALLEAKLTLAVVLQRFRLARSPSYVHAPTVLMLLYPQYGAPVIFRPVSSQLSVSDRTETTRPPRH

SEQ ID NO: 217 - DNA, 947 bp, Zea mays
ttcgttgcaacaaattgatgagcaatgcttttttataatgccaactttgtacaaaaaagcaggcttaaacaatggccgaggaggccaagtacctggagacggcgcgggccgaccgctccgtgtggctcatgaagtgccccccggtcgtctcccgcgcctggcaggccgcctccgcctccgcctcttcctccgacgccgctaacgccaaccccgttgtcgccaaggtcgtcctttccctcgacctgctccgcccagaagaacgccccgaagagcgcccggaagagcccacgctccagttcaagatggagttggcacaaactaacactgggaatacacctaagagctactctttgaatatgttcaaagatttcgtgcctatgtgtgttttctccgaatctaaccaagggaaactttcatgcgaaggaaaagtcgagcataaatttgacatggagcctcacagtgataatttggcgaactatggaaagttatgtcgtgaaagaacacaaaaatatatggttaaatctagacaagtgcaggtacttgacaatgaccacggtatgagcatgagaccaatgcctggcttggttggtctcataccttctggttcaaaggaaaagaagaaacaagcaccagcgaaaccatccgatgtcaaaagaactcgtagggatcgtacggagatggaaaacattatattcaagctttttgaaaggcaacccaattgggcactaaaggcgctggtgcaagaaactgaccagccagagcaatttctgaaggagatattgaacgatctctgtgtgtataataaacgaggaccaaaccagggaactcatgagcttaagccagagtacaagaaatccacaggggacactgatgctgcttaaacccagctttcttgtacaaagttggcattataagaaagcattgcttatcaatttgttgcaacgaac

SEQ ID NO: 218 - protein, 269 aa, Zea mays
MAEEAKYLETARADRSVWLMKCPPVVSRAWQAASASASSSDAANANPVVAKVVLSLDLLRPEERPEERPEEPTLQFKMELAQTNTGNTPKSYSLNMFKDFVPMCVFSESNQGKLSCEGKVEHKFDMEPHSDNLANYGKLCRERTQKYMVKSRQVQVLDNDHGMSMRPMPGLVGLIPSGSKEKKKQAPAKPSDVKRTRRDRTEMENIIFKLFERQPNWALKALVQETDQPEQFLKEILNDLCVYNKRGPNQGTHELKPEYKKSTGDTDAA

SEQ ID NO: 219 - DNA, 471 bp, Zea mays
tgcttttttataatgccaactttgtacaaaaaagcaggcttaaacaatggcgctgaggggggtctggcagctccagaagctcgtggtaaactactgcgactggggagggagcagcaggggcatcagagccttcatggaggcacatcttccagcctttaaggaaaagattccacacttagaagtggtgacagagcttgtccgcggtcaacatcctaacttgaagggaatttacaagaaccataacgagcgagtggtctgcgtgagaaatttaccgccagaagaaatactcctgcaagccaccaggctaaggaactctctgggcaggaaagtggtgaagctgcggaccagacacgtaacgaagcggcccagtgtccaggggacgtggacgacggagctgaagatgtgaacccagctttcttgtacaaagttggcattataagaaagcattgcttatcaatttgttgcaacgaa

SEQ ID NO: 220 - protein, 119 aa, Zea mays
MALRGVWQLQKLVVNYCDWGGSSRGIRAFMEAHLPAFKEKIPHLEVVTELVRGQHPNLKGIYKNHNERVVCVRNLPPEEILLQATRLRNSLGRKVVKLRTRHVTKRPSVQGTWTTELKM

SEQ ID NO: 221 - DNA, 4326 bp, Zea mays
atggaggcggcgctggaggcggcgcgcgccaaggacaccaaggagcgcctggccggggtcgagcggctgcacgaggcgctcgacgccgcggcgcgccgcgggctgaccgcggccgaggtcaccgcgctcgtggacacctgcatggatctgacgcgggacgccaacttccgcatcgcccagggcggcctccaggcgctctccgccgccgccgtcgtcgccggcgaccacttcaagatccatctcaacgccctcgtcccggccgccgtcgaacgcctcggcgacggcaagcagcccgttcgcgacgccgcgcggcagctcctcattactctgatggaggtttcttcaccaacaatcatagttgaaagagctggtagttatgcatggactcataagagttggagggtgcgggaagagtttgtacgtacggtggcaactgcaattgggctatttgcttctactgagatttccttgcaacgggttttgctttcacctgtcctgcaattgatgaatgattcgaaccaaagtgtccgagatgctgctatctattgtattgaggagatgtacaaacacatgggatcacaatttcatgaagagttgcagcgccataatctgccttcatatatgctaaaagaaataaattcgagattggataaaatagaaccaaaggttcgatcatctgatacagcaatgcagtataaggctgtagagtctagatctgttagtgccaatcccaaaagaggcagtccaaggacaaaaagcacaccaagggaaagtacactatatggaggtgacaccgatgttacagaaaaccctgtggaaccagtaaaagttcattctgagaaagaattacttcgggaatttgagaagatcgcagctaccctttctccagaaaaggattggtctttacgtattgctgccttgcaaaggattgaagccctggtttatggaggtgccattgattatccatcatttcttatgctcttgaagcaactggttcctccattgtctaatcagctgtgtgatcgacgttctagtattgtcaaacaggcatgccacctacttaatatactatccaaagaactgctcggtgattttgagccatgtgctgaactattcatcccgatgctttttaagcttgttgtcataaccgtgcttgtgatcgctgaatctgcagatacatgcataaaaactattctgcggaattgcaaggttgctaggattcttcctcgcatagttgacacagcaaagaatgaccggagtgcaatcctccgtgcaaggtgctgtgagtatgcacttctgatactggagtattgggctgatgcctcagaaatacaacgttcagctgatttatatgaggatatgataaaatgctgtgtcgcagatgcgatgagcgaggttagggcaactgcaagaacttgctatagaatgtttgcaaagacatggcctgagcgttcacgccgtctttttatgttatttgatcctgcgatacagaggataataaacgatgaagatggtggtgtgcataaaagatatgcttctccctcattgcgtgatagggttgtgcaaccttcacgtgcttcctctcattcaagtggtacatatgtacctggatatggcacttcagctattgttgcaatggacaagagtgcagctatttcttcagattcatcttttccatcaaccaatcttcggttatcacagtcaaagacgattggcagaagttctgagagaagcctggagagcgtgcttagctccagtaaagaaaaagtttctgccattgaaagtttgctgaaaggtgtcagcatgtcagggcaaaatttctctgctgcacgctcaacaagtttggatcttggagttgatcctccatcatctcgtgatcctcctgtgctgcttgcagcaccagcatcaaatgttctatcattgcagaactcagcactgttggactcatcccttcctaccatcccacctagttcgcgaaatggaggttcccgcttattggaaacgatgacaacacacttgcccaccaaagaaagatcaaggtcaccatacttgagtaatatgtcatctgagtccatgtctggcttatcactgccttactcaagaagatcttcggagaggcttcaagaaggaggccgcatggatgagagctatgatatccgttcaactaggcgaatgcctcaaatgcacttcgacagaaactatgttgatatgccttacagggatgccagccacagagattcacataacaacaatgtcccaaattttcagagacctcttctaaggaaacaagtaatgtcaagggcttctgcaagtggcagacacagctttgatgatagtcatgtaccatcaggtgacgtgcctagctatacagattctctggcttctctaaatgatgcactttctgagggtctcagccctagttctgactgggtagcaagagtttcagctttcgagtttattagaaatttattgaaacaaggccagaaaggcattcaagaaattactcagaattttgagaaggttatgaagctgtttttccgtcatttggatgatcctcaccataaggttgcacaggcagctttctctacacttgcagagattatcccagcttccaagaagccatttgaaagttatgtagagcgaattctaccttatgtattttcacggcttattgatccaaaagagttggtgaaaaaaccatgctccataacattggaggttgttggtcgaacatatgctattgatatgttactacctgcactagtacgctcattagatgaacagagatctccaaaggcaaaattggccgttcttgagtttgcaaataaatcattcagcaagtacactgtggactctgatggttatagtaacagtggcttccttaaactatggctttcaaaattggcacctttggtaaatgaaaagaatgcaaaattaaaggaggcatctatttctggtatcatatccgtttattctcattttgattcaacagcagtgctaaattttattctcagtttgtcagttgaagatcaaaacctcttgaggagagctctgaagatcaaaacccctcgtatcgaggttgatctggtgaactacttgcagagcaagaaagaacgtccacgccccaaatcttatgaccaggtggattttggaacttcggaggatggctatgcactgacatccaagaagagctatccatttggacggttttcttctagttcccttgatgctgaagggggaaagatgatcagttcgatgcacgaaccagtgctgcataatgtttctataggtcgaacaacttctgatatgagcatggatcatgctattcaaagtttggagtcatctacaggagctgaagttcatttaactaggagtagggaaccaaagaataacattaactcagttgtggaagctgctcgctcttggacaaactacactgaaaaaactgatgcctctttagatggtgaaactgctaccagtactcctcggttagatgtcagccggtttgtaacttctgatgggcataatactgttggctcaaccactgaagaaagtgttcaagagggtgatatgattgtgaatcttagttctataaagaccagccttcaaatggacaacggtctgagcgtaccacaacttctctatcagataagcaatgacactgaagtttcaagctcagaaaagcgggaagcactacaacaattggtcgatgcttccctcgataacaacagctccatttgggcaaagtacttcaatcaaatcttaaaggttgtgcttgaagtattagatgactctgattcatccatgagggagcttgctttatctttgattactgagatgctcaactaccagaaagatgcaattgaagactctatggagattgtttttgaaaaactcctgcatgtgaccaaagatgctgtggccaagatttcaaatgaggcaaaccaatgcttaaatgttctattggcaaaatacaaccctttcacatgtcttgctattactgtacctttattggtcagtgatgatgagaagatgcttgttgtgtgtatcaactgcttgacaaagcttgttggacgcctttctcaagaggaattgattgttcaattgcctacatttctgccagcattatttgatgcttttaacaaccaaagtccagatgtccgaaagactgttgtgttctgtctggtggatatctacatcatgcttgggaaagcatttgctccatacttggaagggcttagcagcacgcagctccgcctagtaaccatctacgctaaccggatttcacaggcgaggtccggcaagccaatcgattctaaccaatga

SEQ ID NO: 222 - protein, 1441 aa, Zea mays
MEAALEAARAKDTKERLAGVERLHEALDAAARRGLTAAEVTALVDTCMDLTRDANFRIAQGGLQALSAAAVVAGDHFKIHLNALVPAAVERLGDGKQPVRDAARQLLITLMEVSSPTIIVERAGSYAWTHKSWRVREEFVRTVATAIGLFASTEISLQRVLLSPVLQLMNDSNQSVRDAAIYCIEEMYKHMGSQFHEELQRHNLPSYMLKEINSRLDKIEPKVRSSDTAMQYKAVESRSVSANPKRGSPRTKSTPRESTLYGGDTDVTENPVEPVKVHSEKELLREFEKIAATLSPEKDWSLRIAALQRIEALVYGGAIDYPSFLMLLKQLVPPLSNQLCDRRSSIVKQACHLLNILSKELLGDFEPCAELFIPMLFKLVVITVLVIAESADTCIKTILRNCKVARILPRIVDTAKNDRSAILRARCCEYALLILEYWADASEIQRSADLYEDMIKCCVADAMSEVRATARTCYRMFAKTWPERSRRLFMLFDPAIQRIINDEDGGVHKRYASPSLRDRVVQPSRASSHSSGTYVPGYGTSAIVAMDKSAAISSDSSFPSTNLRLSQSKTIGRSSERSLESVLSSSKEKVSAIESLLKGVSMSGQNFSAARSTSLDLGVDPPSSRDPPVLLAAPASNVLSLQNSALLDSSLPTIPPSSRNGGSRLLETMTTHLPTKERSRSPYLSNMSSESMSGLSLPYSRRSSERLQEGGRMDESYDIRSTRRMPQMHFDRNYVDMPYRDASHRDSHNNNVPNFQRPLLRKQVMSRASASGRHSFDDSHVPSGDVPSYTDSLASLNDALSEGLSPSSDWVARVSAFEFIRNLLKQGQKGIQEITQNFEKVMKLFFRHLDDPHHKVAQAAFSTLAEIIPASKKPFESYVERILPYVFSRLIDPKELVKKPCSITLEVVGRTYAIDMLLPALVRSLDEQRSPKAKLAVLEFANKSFSKYTVDSDGYSNSGFLKLWLSKLAPLVNEKNAKLKEASISGIISVYSHFDSTAVLNFILSLSVEDQNLLRRALKIKTPRIEVDLVNYLQSKKERPRPKSYDQVDFGTSEDGYALTSKKSYPFGRFSSSSLDAEGGKMISSMHEPVLHNVSIGRTTSDMSMDHAIQSLESSTGAEVHLTRSREPKNNINSVVEAARSWTNYTEKTDASLDGETATSTPRLDVSRFVTSDGHNTVGSTTEESVQEGDMIVNLSSIKTSLQMDNGLSVPQLLYQISNDTEVSSSEKREALQQLVDASLDNNSSIWAKYFNQILKVVLEVLDDSDSSMRELALSLITEMLNYQKDAIEDSMEIVFEKLLHVTKDAVAKISNEANQCLNVLLAKYNPFTCLAITVPLLVSDDEKMLVVCINCLTKLVGRLSQEELIVQLPTFLPALFDAFNNQSPDVRKTVVFCLVDIYIMLGKAFAPYLEGLSSTQLRLVTIYANRISQARSGKPIDSNQ

SEQ ID NO: 223 - DNA, 747 bp, Zea mays
atggtggcgcgcgggcagggcggagacagggcggaggaggaggccgcggcgcggtgggagagcgagaaggaggcggagatcgactacgtgttcaaggtggtggtggtgggcgacgcggcggtgggcaagacgcagctgctggcgcgcttcgcgcgggacgagttcgcgctcgactccaagcccaccatcggcgtcgagttccagacgcgcacgctcacgctccaccgcaagcgcgtcaagacgcagatctgggacaccgccggccaggagaggtacagggcggtgacgagcgcgtactaccgcggcgcgctgggcgccatggtggtgtacgacgtgacgcggcgcgccacgttcgagcacgtggcgcggtgggtggaggagctccgcgcacacgccgacgggtccaccgtcgtggcgctcatcgggaacaaggccgacatgcccgcggcgcggcgcgaggtgcccgccgacgaggccgcgcgtctggccgaggaccagggcctcttcttctcggaggcgtccgcgctcacgggcgacaacgtggagcgcgccttcctcacgctcctcgaggaggtcttcgccgccgtgtcgcgcagggcgctggagctcgacgaggcccgccggatgcgcggcgaccagggcgacggcggcggcgaggtgctgtcgctcaaggggaccgcggtggacgtgggctccatcatggagaccagcgccatgaagaggagctcgcagtgcgcttgctcatga

SEQ ID NO: 224 - protein, 248 aa, Zea mays
MVARGQGGDRAEEEAAARWESEKEAEIDYVFKVVVVGDAAVGKTQLLARFARDEFALDSKPTIGVEFQTRTLTLHRKRVKTQIWDTAGQERYRAVTSAYYRGALGAMVVYDVTRRATFEHVARWVEELRAHADGSTVVALIGNKADMPAARREVPADEAARLAEDQGLFFSEASALTGDNVERAFLTLLEEVFAAVSRRALELDEARRMRGDQGDGGGEVLSLKGTAVDVGSIMETSAMKRSSQCACS

SEQ ID NO: 225 - DNA, 2502 bp, Zea mays
atgattttattttgactgatagtgacctgttcgttgcaacaaattgatgagcaatgcttttttataatgccaactttgtacaaaaaagcaggcttaaacaatggcggaggagcagatcgaagaggcgtccatggccgcggcggcggccacgccgttccagctccagttcgacaagcccatcccgttccagataaaaatggcagaatggaatccagagaaggatctgcttgctatggttactgatgactccaaggttctcctccatcgcttcaattggcaaaggctttggacaatctctccagggaagtgcatcacatcaatttgttggagccctgatggtaaaataatagcacttggcacagaagatggtttgattcttttgcatgatgtggagaatgggaagatgctaagaactacaaaatcccacgatgttgccattgtatctttgaattgggcagaagacgatccactgtcaaagtctgacaaggatgagtttttatcctatgaagaccgcaccacacgtttctttcctcctcctcctgtgatgcctaggataggtggactacgttctggagatactggtcttgcggatgagaacgaagaagctattccagaattttctagtgcttcctgtcagcgttttaacattctgtgcagtggtggcaaagatggttgtgtttgcttcagcgtttttggaatatttcctgttggaaagataaacataactaaaatcccaatcaatgttggatcctctagaaagagttaccaactccaggatgcttcagtcagcaaggtctctttatcaagaaacctccagaaatttgttattctgtgctttggaaagttggttgataccgacaacctctctgacagctgcgaaaattctggattacattgtctctacctagatacttctatcttcttcaaccgaaaaaatgagctgcatcaggtgtcccaacaagcatcaagtattcaagatatggttgaagttgtccgtgcttctgtatctttaatatccaaacaatggtcaaacgccatgagtttattccatgagaaatttagtgccttgcccaatctgatatctacacatggagtggaatctagttctgaggatgagtttcttagccttttgtttgggacacgaacaagtccagcccttcaccattttttagctagttcacttggtgaagcgggtctcaagaggatagccaaggctgttgacagtgctggaagagatattcgtggcattatcactgagcatcttcagcctgcagtggagattatttcattcagactcgcagaattaagaggcctttcaagatggcgttcacgatttcaaactatcgggttagatggaaaccttattgatggtgtaactgagagtatagggatgctagttgttcaagtggagcgcttttcaagggtggcagccactgttgtttatctgtttcaaaatttctttgcctgggttttaaagtctgttagaatattattaaatgaacctaccgaccaagttccagcagcaaacagtgaacttgtggtgatttttcttaagtttcttcttgataaggatccaatcaaacaactacttgaagcagatgagagaattgagtgtgatatggatactgcaagacatgtagaacagctagtagtttttggaggatttacagacacccaatttttggaaaagagtttggtaaatcaattcaatgaattggaagatagcttgaaggaggctttcttgatgccatttactgctatctcttcgcagatacaatgtcaaggattgcttcctttatatcctgttacatcatcagctaccttgtcatcatcctgctcgccaacatcaatatcattttataaggatgaagattcatcgcatgaggaatcctcttatagcttgactgactatgtatgcttgaagatacctgatggatcattaaataaagtaaattgcatcggtgtgataaagggctctggtaactgttgtactaccctcagcatgatgtcactttcaggttttctgttgcatatacctgacggatatgagtgtgttgacctgtcactttataaggacaaccaggtagttttactactgagtgaaacgtcttgttctgatagccctggaaaatcttggatggtgatgctgcaaatagagaacttttcctttatgccactctcaggaacattccctgcaaatatttacagtttgcaaaaactggtggcactcgatctgcaattggacacagattatgggaaagttcgtagcatacctcacaccgtatctactccatttgcagttagtgcatcgagaggagtagcctgtgtcttttcatcccggaggcatgccttggtttatatccttgatgaggatgaggaagcggagggggatgaaacttccgatatggagtgaacccagctttcttgtacaaagttggcattataagaaagcattgcttatcaatttgttgcaacgaacaggtcactatcagtcaaaataaa

SEQ ID NO: 226 - protein, 770 aa, Zea mays
MAEEQIEEASMAAAAATPFQLQFDKPIPFQIKMAEWNPEKDLLAMVTDDSKVLLHRFNWQRLWTISPGKCITSICWSPDGKIIALGTEDGLILLHDVENGKMLRTTKSHDVAIVSLNWAEDDPLSKSDKDEFLSYEDRTTRFFPPPPVMPRIGGLRSGDTGLADENEEAIPEFSSASCQRFNILCSGGKDGCVCFSVFGIFPVGKINITKIPINVGSSRKSYQLQDASVSKVSLSRNLQKFVILCFGKLVDTDNLSDSCENSGLHCLYLDTSIFFNRKNELHQVSQQASSIQDMVEVVRASVSLISKQWSNAMSLFHEKFSALPNLISTHGVESSSEDEFLSLLFGTRTSPALHHFLASSLGEAGLKRIAKAVDSAGRDIRGIITEHLQPAVEIISFRLAELRGLSRWRSRFQTIGLDGNLIDGVTESIGMLVVQVERFSRVAATVVYLFQNFFAWVLKSVRILLNEPTDQVPAANSELVVIFLKFLLDKDPIKQLLEADERIECDMDTARHVEQLVVFGGFTDTQFLEKSLVNQFNELEDSLKEAFLMPFTAISSQIQCQGLLPLYPVTSSATLSSSCSPTSISFYKDEDSSHEESSYSLTDYVCLKIPDGSLNKVNCIGVIKGSGNCCTTLSMMSLSGFLLHIPDGYECVDLSLYKDNQVVLLLSETSCSDSPGKSWMVMLQIENFSFMPLSGTFPANIYSLQKLVALDLQLDTDYGKVRSIPHTVSTPFAVSASRGVACVFSSRRHALVYILDEDEEAEGDETSDME

SEQ ID NO: 227 - DNA, 939 bp, Zea mays
tcgttgcaacaaattgatgagcaatgcttttttataatgccaactttgtacaaaaaagcaggcttaaacaatgttgtggcgcgcagtacgcagtatggatgtaataatgcattcttcgagtttccttcttccgaaactgtatcaacctgtcaacaaaccagtcaagaactatgctttagatgttctaaaccagcatcttccacgattcatgcctcgactctgggatcatgcaaacttgaggatctgcgctgatggaggagctaatcatatttttgatgagatgtatcagataaccaatgatgaagacaaaaaaagcaccagaaataagtatgttccagaaataattgaaggggacatggattctataagacctgaagtaaaactgttctactctagtcagggatccaaaatttctgataagtcacataaccaggagacaacagatctacacaaatgtatttctcgaatccatcattgtacgcctgatgatgaaaaaccaaatctctgtgtacttgttactggagcactaggtggaaggtttgatcacgaggcggcaaatatcaatgttctgtatctgttttcggacatgaggattgtcctcctatcagacgattgcttgatccgacttcttccgagaacacatcgccatgagctttatattgagtcgtctgttgaaggaccccattgtgggcttttccctgttggagcaccatcaacaagcacaacaactactggcctgaaatggaatctaagtgaatcaaagatgagatttgggagcatgataagcacatccaacattgtgcagtcggagaaagtaactgtagaatctgatgcagatctcttgtggacaatttctctgcgaaatctgacataaacccagctttcttgtacaaagttggcattataagaaagcattgcttatcaatttgttgcaacgaa

SEQ ID NO: 228 - protein, 267 aa, Zea mays
MLWRAVRSMDVIMHSSSFLLPKLYQPVNKPVKNYALDVLNQHLPRFMPRLWDHANLRICADGGANHIFDEMYQITNDEDKKSTRNKYVPEIIEGDMDSIRPEVKLFYSSQGSKISDKSHNQETTDLHKCISRIHHCTPDDEKPNLCVLVTGALGGRFDHEAANINVLYLFSDMRIVLLSDDCLIRLLPRTHRHELYIESSVEGPHCGLFPVGAPSTSTTTTGLKWNLSESKMRFGSMISTSNIVQSEKVTVESDADLLWTISLRNLT

SEQ ID NO: 229 - DNA, 1459 bp, Zea mays
tattttgactgatagtgacctgttcgttgcaacaaattgatgagcaatgcttttttataatgccaactttgtacaaaaaagcaggcttaaacaatgggccttcgcggcggagctcttgccctgcttctgctcctgttcgtccacggaggccagcgagcagcagaggccggcggggacgcgttcgtgagggtccagggcacccgcttcgtgcaggacggcaagccgttcttcgccaacgggttcaacgcctaccggctcatgacattcggcgccgaccccgcgcggaggggcaaggtcacctcggcgctcagccaggccgccggcgccggcctctccgtggccaggacgtgggcgttcagcgacggcggcggcggcggcggcagcgcgctgcagtactctcccggccgctacaacgagaacaccttccaggggctggatttcgtgctgtctgaggcaaggaagcatgggattaagatgattctgagcctcgtgaacaattacgacagctttggagggaggaagcagtacgtgcagtgggcgagggagcgggggcagaccattggatctgacgatgagttcttcactaacccctttgtaaagggcatctacaagaaccatatcaaggccgttctgacgagggtgaacacgatcaccggcgtggcatacaaggacgacccgacgatcatggcgtgggagctgatgaacgagtcgcgttgccagtccgacgtgtcgggccacgccatccagtcgtggatcacggagatggcggcgcacgtgaagtccatcgacgggaaccacctgctggaggccggcctggagggcttctacggcgcgtcgtcggcccgcaggtccgcgaacccgtcggggtaccaggtgggcaccgacttcatcgccaacaaccgggcgcccgggatcgacttcgccaccgtgcactcgtacccggaccagtggctgggcggcctggacgcgcaggcgcagctgcggttcctgggcgcctggctcgacgcccacatcgccgacgcgcgggcggtgctgcgcaagccgctgctggtggccgagttcggcgagtcgcgccacgacccgggctacagcggcggccaacgcgacgcggtgttcggcacggtgtacgccagggtctacgactcggcgcgcgccggaggccccgcggcgggcgcgctcttctggcagctcctggcggaggggatggactcctacggggacggctacgaggtcgtcctcccgcaggcgccgtccaccgccggagtcatcgccacgcagagccggaggctgcagggcctcgccagggcgttcgtgcgcgcgcgcaaggcccaccaggggaaggcgggcaagggcgctaagggtggcggcaactgaacccagctttcttgtacaaagttggcattataagaaagcattgcttatcaatttgttgcaacgaacaggtcactatcagtcaaaa

SEQ ID NO: 230 - protein, 426 aa, Zea mays
MGLRGGALALLLLLFVHGGQRAAEAGGDAFVRVQGTRFVQDGKPFFANGFNAYRLMTFGADPARRGKVTSALSQAAGAGLSVARTWAFSDGGGGGGSALQYSPGRYNENTFQGLDFVLSEARKHGIKMILSLVNNYDSFGGRKQYVQWARERGQTIGSDDEFFTNPFVKGIYKNHIKAVLTRVNTITGVAYKDDPTIMAWELMNESRCQSDVSGHAIQSWITEMAAHVKSIDGNHLLEAGLEGFYGASSARRSANPSGYQVGTDFIANNRAPGIDFATVHSYPDQWLGGLDAQAQLRFLGAWLDAHIADARAVLRKPLLVAEFGESRHDPGYSGGQRDAVFGTVYARVYDSARAGGPAAGALFWQLLAEGMDSYGDGYEVVLPQAPSTAGVIATQSRRLQGLARAFVRARKAHQGKAGKGAKGGGN

SEQ ID NO: 231 - DNA, 544 bp, Zea mays
gttgcaacaaattgatgagcaatgcttttttataatgccaactttgtacaaaaaagcaggcttaaacaatgacccaagcgaagtccactcctgggaggagggagatgggccgggcgcgatcgccggaaccgctcgatttcttcatatggactgtcgaggatgttggattatggctggaagaaataaatcttggtggctacagacaagtatttcaagaaaatagtgtcaatggagaatatctagaaagcttgtccatgtttactactgagcagattctgcgctttattaggcggtgccatatgaaatggggagactttatcacactgtgcaaagagttgaggcgcattaaagtggcgtgccttaaaggggagcaagaagtccgcaggccatggtgggcgccggcatgcctctccgtagttttcgtgagggcagccaagcagaacaggaagtcccgtgttgtctcgttgaagctggaaccataaacccagctttcttgtacaaagttggcattataagaaagcattgcttatcaatttgttgcaac

SEQ ID NO: 232 - protein, 137 aa, Zea mays
MTQAKSTPGRREMGRARSPEPLDFFIWTVEDVGLWLEEINLGGYRQVFQENSVNGEYLESLSMFTTEQILRFIRRCHMKWGDFITLCKELRRIKVACLKGEQEVRRPWWAPACLSVVFVRAAKQNRKSRVVSLKLEP

SEQ ID NO: 233 - DNA, 1209 bp, Zea mays
ggccccaaataatgattttattttgactgatagtgacctgttcgttgcaacaaattgatgagcaatgcttttttataatgccaactttgtacaaaaaagcaggcttaaacaatggtgaggccgccgtgctgcgacaaggagggcgtcaagaaggggccatggacgccggaggaggacctcgtcctcgtctcctacatccaggagcacggccccggcaactggcgcgccgtcccggccagaaccgggctgatgcggtgcagcaagagctgccgtctgcggtggaccaactacctccggccgggcatcaagcgcggcaacttcaccgagcaggaggagaagctcatcgtgcacctccaggccctcctcggcaacaggtgggcggccatcgcgtcgtacctgccggagcggacggacaacgacatcaagaactactggaacacgcacctcaagcgcaagctgcagagcggcggcgacggggcggccaagccgccggcgcacaggccgccgtcgtcgtccaagggccagtgggagaggaggctgcagacggacatcaacctggcgcgccgcgcgcttcgcgaggccctcaccccgctcgacgacctcaagccgcagctgcagcgcgacgccgccgccgacgcgccggccgctggcgcgggcacgggcggcggtgacagcccggcttcgagctcgtcgggcgcgtcgcagtcctcccctttggcgccagcggccttcgccgccgccgccgcggggccgtacgttctcaccgcggagaacatctcgcggatgctggacgggtgggctggccggaaggtccgcggcggcgggaccccgggcacccccggcggtgccgagagcgcgtccacgggatcctcggacgcgtcggaggtgtcgtacggtggcgccgccgtcgcatcggccgcgccggcgcccgcttgtggtgggccggtcttcgaatacgaggcgaagccgggcgtgccgacgtcccatcagcagatgccgctgtcggcgatcgagtcgtggctgttcgacgacgacagccacttgcaccatgctgtccagagcgccagcttgctcgatgccgcccccatggattaccccttctagacccagctttcttgtacaaagttggcattataagaaagcattgcttatcaatttgttgcaacgaacaggtcactatcagtcaaaataaaatcattatttgccatc

SEQ ID NO: 234 - protein, 330 aa, Zea mays
MVRPPCCDKEGVKKGPWTPEEDLVLVSYIQEHGPGNWRAVPARTGLMRCSKSCRLRWTNYLRPGIKRGNFTEQEEKLIVHLQALLGNRWAAIASYLPERTDNDIKNYWNTHLKRKLQSGGDGAAKPPAHRPPSSSKGQWERRLQTDINLARRALREALTPLDDLKPQLQRDAAADAPAAGAGTGGGDSPASSSSGASQSSPLAPAAFAAAAAGPYVLTAENISRMLDGWAGRKVRGGGTPGTPGGAESASTGSSDASEVSYGGAAVASAAPAPACGGPVFEYEAKPGVPTSHQQMPLSAIESWLFDDDSHLHHAVQSASLLDAAPMDYPF

SEQ ID NO: 235 - DNA, 786 bp, Zea mays
atgaagcggccacgcggcgccagtccccctctggctgcgatgaccaatccgaacgatgatggttacggcgtggtcgggatggaggcggacgcagacgcggacgcggacgaggagatgatggcgtgcggcggcggcggggagaagaagcggcgcctgagctccgagcaggtgcgcgcgctggagcggagcttcgaggtggagaacaagctggagccggagcgcaaggcgcggctggcgcgcgacctcggcctgcagccgcgccaggtcgccgtctggttccagaaccgccgcgcccgctggaagaccaagcagctggagcgcgactactccgcgctccgccagtcctacgacgcgctgcggcacgaccacgacgcgctgcgccgcgacaaggacgccctcctcgccgagatcaaggagctcaaggcgaagctcggggacgaggaggcagcggcgagcttcacgtcggtcaaggcggagccggcggcctcggacgggcctccccccgtaggggtggggtcgtccgagagtgactccagcgcggtgctgaacgacgcggacccgcccgtggcggaggcgccggtgccggaggtacggggtactcttcttgacgcgcccggcgccgtggcggcgaaccatggcggcgtgttcttccacgggagtttcctgaaggtggaggaggacgagacggggctcctggacgacgatgagccctgcggcgggttcttctccgtggagcagccgccgccgatggcgtggtggaccgagcccacggaacactggaactga

SEQ ID NO: 236 - protein, 261 aa, Zea mays
MKRPRGASPPLAAMTNPNDDGYGVVGMEADADADADEEMMACGGGGEKKRRLSSEQVRALERSFEVENKLEPERKARLARDLGLQPRQVAVWFQNRRARWKTKQLERDYSALRQSYDALRHDHDALRRDKDALLAEIKELKAKLGDEEAAASFTSVKAEPAASDGPPPVGVGSSESDSSAVLNDADPPVAEAPVPEVRGTLLDAPGAVAANHGGVFFHGSFLKVEEDETGLLDDDEPCGGFFSVEQPPPMAWWTEPTEHWN

SEQ ID NO: 237 - DNA, 647 bp, Zea mays
tttattttgactgatagtgacctgttcgttgcaacaaattgatgagcaatgcttttttataatgccaactttgtacaaaaaagcaggcttaaacaatggcgaacgcgggcatgaggccggtggccggcctcctcctggtgctcaacttctgcatgtacatcatcgtggcggcggtgggcggctgggccatcaaccacgccatcaactacggcttcttcatcggcgccggcctgcagctcccggctcacttctccccgatctacttccccgtcggaaacgcggcgaccgggttcttcgtcatcttcgccgtgatcgccggggtcgtcggcgcggcctcggcgctcgcggggttccaccacgtccgcgcctggaacgccgagagcctgccggcggcggcctccgccgggttcattgcctggacgctcaccctgctcgccatggggttggcggtgaaggagattgaactgcacggcaggaatgccaggctgatatgcatggagtccttcaccatcatcctgtcagcgacgcagctcttctacctgctcgccatatacggaggcttgagatgaacccagctttcttgtacaaagttggcattataagaaagcattgcttatcaatttgttgcaacgaacaggtcactatca

SEQ ID NO: 238 - protein, 157 aa, Zea mays
MANAGMRPVAGLLLVLNFCMYIIVAAVGGWAINHAINYGFFIGAGLQLPAHFSPIYFPVGNAATGFFVIFAVIAGVVGAASALAGFHHVRAWNAESLPAAASAGFIAWTLTLLAMGLAVKEIELHGRNARLICMESFTIILSATQLFYLLAIYGGLR

SEQ ID NO: 239 - DNA, 558 bp, Zea mays
atggcgaggatactcgtcgaagcgcccgcaggctcgggctcgccggaggactccatcaactcggacatgatcctcatcctcgccggcctgctctgcgcgctggtctgcgtcctcggcctgggcctcgtcgcccgctgcgcgtgctcgtggcgctgggccaccgagtccggccgggcgcagccgggcgccgccaaagccgcgaacaggggcgtcaagaaggaggtgctgcgctcgctcccgaccgtcacgtacgtctccgacagcggcaaggcggagggaggggccgacgagtgcgccatctgcctcgccgagttcgagggaggccaggccgtgcgcgtgctgccgcagtgcggccacgcgttccacgccgcctgcgtcgacacgtggctgcgcgcgcactcctcctgcccgtcctgccgccgggtgctggccgtcgacctgccccccgccgagcggtgccgccgctgcggcgcgcgccccggtgccggtgccggcatcagcgcgctctggaaggcgcccacgcgctgcagcgccgaggggccgacgttcttggcgtag

SEQ ID NO: 240 - protein, 185 aa, Zea mays
MARILVEAPAGSGSPEDSINSDMILILAGLLCALVCVLGLGLVARCACSWRWATESGRAQPGAAKAANRGVKKEVLRSLPTVTYVSDSGKAEGGADECAICLAEFEGGQAVRVLPQCGHAFHAACVDTWLRAHSSCPSCRRVLAVDLPPAERCRRCGARPGAGAGISALWKAPTRCSAEGPTFLA

SEQ ID NO: 241 - DNA, 1197 bp, Zea mays
ggccccaaataatgattttattttgactgatagtgacctgttcgttgcaacaaattgatgagcaatgcttttttataatgccaactttgtacaaaaaagcaggcttaaacaatgggccgcgcgatgaggtggctcaagaaggtgctcgccggcagcaagcaccaaggggacagggatcgcaaggcgcaaaacgccgcgtgcgccgccttgccgcccgcggagaagaggcggtggagcttcgccaagccgaggaacagcgtggctgacggcggcgcccggcggccctccgtcgccgccggggagctgtcgcaggtgcgcccgtgcagctgcggccaggagcgcgtggccgccgccgccgtcgtcatccagaaggccttcagaggatacttggctcggaaggcgctccgcgctctcaggtcgctggtgaagctgcaggctctggtgcgtgggtacctggcgaggaagcggaccgccatgacgctgcgcaggctgcaggcgctcatgaggctccaggcgtcatcccggagatccgtcgaacaagagcggatcgccgcgcgggtgaagccactggccctgcccgcggcgcaccggcggcggctgtccgacggcggggacgaccgcagcccgaggatcgtggagatggacacgtgccagctccgctgccggtcgtcccggatcacgacgagccgctacttccacgagccggcgtggtgcctcctgcaggggccagagcaggtcgagcctgcgcacccgaagacgacgcacaacacgccccgcctcggcgcgttcccggggtacctcggctccccggcgaagccgcgcgcggccgcgtgccgggacgccgggagcagcccgcggtacatggcggacacggcctcgtccacggcgcgcgcccggttgcagagcgcgcccaggcagcacgcagggcgagagcaggcgacgaggcccagcgttggccgcagcgcgagcgggccgaggaagcagcaggacagcttcagcttccagagctccgaggccagccgcgtggaggtggagggctcggagctgagcgacgaggtcaccagagactactacctggaccgtctctggtgaacccagctttcttgtacaaagttggcattataagaaagcattgcttatcaatttgttgcaacgaacaggtcactatcagtcaaaataaaatcattatttgccatc

SEQ ID NO: 242 - protein, 326 aa, Zea mays
MGRAMRWLKKVLAGSKHQGDRDRKAQNAACAALPPAEKRRWSFAKPRNSVADGGARRPSVAAGELSQVRPCSCGQERVAAAAVVIQKAFRGYLARKALRALRSLVKLQALVRGYLARKRTAMTLRRLQALMRLQASSRRSVEQERIAARVKPLALPAAHRRRLSDGGDDRSPRIVEMDTCQLRCRSSRITTSRYFHEPAWCLLQGPEQVEPAHPKTTHNTPRLGAFPGYLGSPAKPRAAACRDAGSSPRYMADTASSTARARLQSAPRQHAGREQATRPSVGRSASGPRKQQDSFSFQSSEASRVEVEGSELSDEVTRDYYLDRLW

SEQ ID NO: 243 - DNA, 1442 bp, Zea mays
attttattttgactgatagtgacctgttcgttgcaacaaattgatgagcaatgcttttttataatgccaactttgtacaaaaaagcaggcttaaacaatggcgctcgtattgcatagtggggctggaaacaagaatgccttcaaagcacttattgctgcagaatacagtgggatcaaggttgagttgaccaaggattttgagatgggtgtctccaacaagacccctgagtttcttaagatgaacccccttgggaaggttcctgttctggagactcctgatggccctgtttttgagagtaatgctatcgcacgctatgttgctcgcttgaaggatgacaaccctctttttgggtcttcccgtattgaacaagcccacgttgagcaatggatggattttgccgcaacagaagttgatcctggtgttgcatggtacttgtatccaaggcttgggtacctcccttatgttagcacaactgaggaaacagctatttcttcattgaagaggtcgcttggtgctctgaacacacaccttgcttcaaacacataccttgttgggcatgctgttactctagctgacattgtaatgacatgcaacctctaccatggaattgcacggatcttgaccaagaccttcacgtctgatttccctcatgtcgagaggtatttctggaccatggttaaccagcctaacttcaagaaggtcattggtgaggtcaagcaggcagagtctgcacctcctattccgaaaaaggctgctccttctaaggagccaaaggcaaaggatgtcaagaaggaggctccaaaggaggcccccaagccaaaggtggttgaggcaccagcagaagaggaagcaccaaagccaaagccaaagaatcctcttgacttgctgccaccaagcaagatggtccttgatgactggaagaggctatactcaaacacaaagactaacttccgggaggttgccatcaaaggtttctgggacatgtacgacccagagggctactctttgtggttctgtgactacaagtacaatgatgagaacaccgtctcctttgtgaccctgaacaaggttggtggattcctgcagcggatggacctgtgccgcaagtacgcctttgggaagatgctcgtgataggctctgagccacccttcaagctgaagggcctttggctcttccgtggccaggatgttcccaagtttgtaatggacgaggtctatgacatggagctctacgagtggaccaaggtggacatctctgatgaggcccagaaggagcgtgtcaatgcgatgattgaggaccaggagccctttgagggcgaggccttgcttgacgcgaaatgcttcaagtgaacccagctttcttgtacaaagttggcattataagaaagcattgcttatcaatttgttgcaacgaacaggtcactatcagtcaaaataaaat

SEQ ID NO: 244 - protein, 417 aa, Zea mays
MALVLHSGAGNKNAFKALIAAEYSGIKVELTKDFEMGVSNKTPEFLKMNPLGKVPVLETPDGPVFESNAIARYVARLKDDNPLFGSSRIEQAHVEQWMDFAATEVDPGVAWYLYPRLGYLPYVSTTEETAISSLKRSLGALNTHLASNTYLVGHAVTLADIVMTCNLYHGIARILTKTFTSDFPHVERYFWTMVNQPNFKKVIGEVKQAESAPPIPKKAAPSKEPKAKDVKKEAPKEAPKPKVVEAPAEEEAPKPKPKNPLDLLPPSKMVLDDWKRLYSNTKTNFREVAIKGFWDMYDPEGYSLWFCDYKYNDENTVSFVTLNKVGGFLQRMDLCRKYAFGKMLVIGSEPPFKLKGLWLFRGQDVPKFVMDEVYDMELYEWTKVDISDEAQKERVNAMIEDQEPFEGEALLDAKCFK

SEQ ID NO: 245 - DNA, 994 bp, Zea mays
gggccccaaataatgattttattttgactgatagtgacctgttcgttgcaacaaattgatgagcaatgcttttttataatgccaactttgtacaaaaaagcaggcttaaacaatggcagaagcagccggcggcggacccctgctccccgaggaactcgttatctgggagatcctgacgcgtctgccggcgaagcccctcctccggtgccgcgccgtctgcctctcctggcgccgccgactcacctccgacgctaagttcctcctcgcccaccaccgtcgccagccgtcgctcccgctcctcacccaaggggacaggagcaccgaggacaggaggatcgacgccctggactaccgcaccggcgagcggctccccgtcgcgcggacgacgggccggaccgccgccaacgccgacgacctgaacgtgctcgcttcctgcgacggcctcctcgtcctcatcgccaacggcggcctccacatctgcaacccggcgacccgccagcgcgcgccgctcgcccttctccacggcgcctcctgcatctccgcgctttacccttaccgcccgtccgggtcgtaccgggtggcgggtgctctgctgcttcgagagagccgaggacggccacgccgtgtaccacgtgcacaccgtcgggtcgcgcgagctcaggtgcgtcggagaacctcccgcgctgtgggcgtccggagacgtggcgatggcgatgccgatgatgttgtgctttcacccgcacgtcgtggcaggcagcaggatctactggcagccggtaaagctgcccggcggcaacgggaaggtcaacaacatgctcgcgttcgatacagtgaccgagtccttccagcaacagctgtcgcccccgcccgtggagggccccttccttgaacccagctttcttgtacaaagttggcattataagaaagcattgcttatcaatttgttgcaacgaacaggtcactatcagtcaaaataaaatcattatttgccatc

SEQ ID NO: 246 - protein, 258 aa, Zea mays
MAEAAGGGPLLPEELVIWEILTRLPAKPLLRCRAVCLSWRRRLTSDAKFLLAHHRRQPSLPLLTQGDRSTEDRRIDALDYRTGERLPVARTTGRTAANADDLNVLASCDGLLVLIANGGLHICNPATRQRAPLALLHGASCISALYPYRPSGSYRVAGALLLRESRGRPRRVPRAHRRVARAQVRRRTSRAVGVRRRGDGDADDVVLSPARRGRQQDLLAAGKAARRQREGQQHARVRYSDRVLPATAVAPARGGPLP

SEQ ID NO: 247 - DNA, 1020 bp, Zea mays
atgcctgccgcgccgacgctgttgcccccgtgcgacgcggaggagccgctgctggcggagtcctccgaccgcttctccatgttcccgatccgtttcccgcagatctgggagttctacaagaaggcggtggcctccttctggacggcggaggaggttgacctctctgccgacgcccggcactgggacgaggcgctgtcccccgacgagcggcacttcatctcccacgtgctcgccttcttcgctgcctccgacggcatcgtgctcgagaacctcgcttcccgcttcatgaccgacgtgcaggtcgccgaggcgcgggccttctacggcttccagatcgccatcgagaacatccactcggagatgtattcgctgctgctcgagacctacatccgcgaccacgtcgagaaggaccgcctgttccgcgccatcgacaccgtgcccgcggtccggcgcaaggctgactgggccatgcgctggatcgacggcggggagcgcttcgctgagcgcatcgttgccttcgcctgcgtcgagggcatattcttctcggggtccttctgcgccatcttctggctcaagaagcgcgggctcatgccgggcctcaccttctccaacgagctcatctcccgcgatgagggcctccactgtgatttcgcctgcctcctctacgagcttctccgcaacaagctcgacgaggcccgcgtacgcgagatcgtcgcagacgctgtcgacatcgagcgcgagttcgtctgcgacgccctccctgtcgcgctcgtcggcatgaacggggatctcatgagccagtacattgaattcgtggccgaccgcctgctcatggcgctcgggtgcaagaagatgtacaacgtgaccaatcccttcgactggatggagctcatctcgctgatggggaagaccaacttcttcgagaagcgcgtgggtgactaccagaaggcatccgtcatgaacagcctcaacggcggcggcgctgccgaccacgtcttcagcatcgacgaggacttctga

SEQ ID NO: 248 - protein, 339 aa, Zea mays
MPAAPTLLPPCDAEEPLLAESSDRFSMFPIRFPQIWEFYKKAVASFWTAEEVDLSADARHWDEALSPDERHFISHVLAFFAASDGIVLENLASRFMTDVQVAEARAFYGFQIAIENIHSEMYSLLLETYIRDHVEKDRLFRAIDTVPAVRRKADWAMRWIDGGERFAERIVAFACVEGIFFSGSFCAIFWLKKRGLMPGLTFSNELISRDEGLHCDFACLLYELLRNKLDEARVREIVADAVDIEREFVCDALPVALVGMNGDLMSQYIEFVADRLLMALGCKKMYNVTNPFDWMELISLMGKTNFFEKRVGDYQKASVMNSLNGGGAADHVFSIDEDF

SEQ ID NO: 249 - DNA, 1042 bp, Zea mays
aattgatgagcaatgcttttttataatgccaactttgtacaaaaaagcaggcttaaacaatggacgtggtgaaggcggcgcagttgtcggggcggacgctggaacgggtagtggtgcatcccttggtgctgctcagcatcgtcgaccactacaaccgcgtcgcccgcgacacccgcaagcgcgtcgtcggcgtcctcctcggcacctcatcccgcgggtccgtcgatgtcaccaactcctacgccgtgccgtttgaggaggatgacaaggatcctaggatctggttccttgaccacaattaccacgagtcaatgttctccatgttcaagaggattaatgccaaggagcatgttgttggctggtacagcactggcccaaaactaagggagaacgacttggatgtccatgcattattcaacagttatgttcctaatccagtcttggtgattattgatgtccaacccaaggagctgggtataccgaccaaagcgtactacgctgtggaggaggttaaagagaatgcaactcagaaaagtcagaaggtatttgtccatgttccttcagaaattgcagctcatgaagttgaggaaattggagttgaacaccttctaagggatgtcaaggacacaacaataagcacacttgctacagaggtcactagcaagcttgcagccttaaagggactcgatgcaaggcttagggagatccgaagctatttggatcttgtaattgacgggaagctcccactgaatcacgaaattttgtaccatttgcaggatgtctttaatctccttccaaatttgaacgtaaatgagctaattaaagcctttgcagtgaaaacaaacgacatgatgttggtgatatacctgtcttctctgatccggagcgtcattgcgcttcacaatttaatcaacaataagatgctaaacaaggagcacgagaaggccgaggattcgaaaccaaccgccattcctactgctgccggaagctaaacccagctttcttgtacaaagttggcattataagaaagcattgcttatca

SEQ ID NO: 250 - protein, 310 aa, Zea mays
MDVVKAAQLSGRTLERVVVHPLVLLSIVDHYNRVARDTRKRVVGVLLGTSSRGSVDVTNSYAVPFEEDDKDPRIWFLDHNYHESMFSMFKRINAKEHVVGWYSTGPKLRENDLDVHALFNSYVPNPVLVIIDVQPKELGIPTKAYYAVEEVKENATQKSQKVFVHVPSEIAAHEVEEIGVEHLLRDVKDTTISTLATEVTSKLAALKGLDARLREIRSYLDLVIDGKLPLNHEILYHLQDVFNLLPNLNVNELIKAFAVKTNDMMLVIYLSSLIRSVIALHNLINNKMLNKEHEKAEDSKPTAIPTAAGS

SEQ ID NO: 251 - DNA, 1494 bp, Zea mays
aaataatgattttattttgactgatagtgacctgttcgttgcaacaaattgatgagcaatgcttttttataatgccaactttgtacaaaaaagcaggcttaaacaatggaacgcagacgtgcagacaaggaggaggcagaagagccgctgaggcccgaggaggaagaagatgaggaggacgaagaggaggggtgggacgactggtgctccgacggcgaagatgttggcggtgggctgctgtgtttgttctgtagctcgagtttcgactccgagagctcactcttcgagcactgcgccgccgagcactgctttgatttccacatgattgtgaaggagctggggctggatttctacagctgcatcaagctcatcaactttgtccgctccaaggttgcagagaaaaaatgctggagctgtggccaagcattctcttccaacacagaactctgcagccacttgcacacagtggagaattgcctaattgagggaaaggtgccatgggaggacgatgtgtacttgaaacctttcatggaagatgactcccttttgcacagcttgtcaatcgatgacgatgatgaagatggggactgtggagtgtcaatggaaaagggacaatattcagctgggaatgaggttttagctgaaccatgggggaacaagctgagcagcatatcagaaagaaatgattctgacatcagtgctcaatttcagcaagagtgtactattggtagtacacaaagggaagtcagagagtcccttcatgtggcgattgatggccacctaaaggttgcacgtgctagtgttaattccaaagcaatcaaaactgtggatgataactactttggatcttatagttcatttggtatccacagggagatgctcggtgataaagtcagaacagatgcttacagagatgcaattttaggcaatcctagcctaataagtggagcaactgtactagatgttggttgtggcacaggaattctaagtctttttgcagctagggctggtgcatctagagttgttgctgttgatgggagtgcaaagatggcttctgtggctacccaagttgcaaagaataatggtctgttgtatgatgagaacgtggaagcagaacagaagcaaggcagtgctcaagttataagtgtcgtacatacaaaggctgaagagctaaaccagaaaatacaagtcccacaaaatggctttgatctattagtgagtgaatggatgggatattgcctgctgtacgaatccatgctaagttctgtcatatatgcacgtgatcattttctaaaacctggtggtgctattctcccagatactgcaatgattgtaagtcagttgcttccttgtattctgtcctgtattttctgctgtttgacaactcgtgcctgaacccagctttcttgtacaaagttggcattataagaaagcattgcttatcaatttgttgcaacgaacaggtcactatcagtcaaaataaaatcattattt

SEQ ID NO: 252 - protein, 429 aa, Zea mays
MERRRADKEEAEEPLRPEEEEDEEDEEEGWDDWCSDGEDVGGGLLCLFCSSSFDSESSLFEHCAAEHCFDFHMIVKELGLDFYSCIKLINFVRSKVAEKKCWSCGQAFSSNTELCSHLHTVENCLIEGKVPWEDDVYLKPFMEDDSLLHSLSIDDDDEDGDCGVSMEKGQYSAGNEVLAEPWGNKLSSISERNDSDISAQFQQECTIGSTQREVRESLHVAIDGHLKVARASVNSKAIKTVDDNYFGSYSSFGIHREMLGDKVRTDAYRDAILGNPSLISGATVLDVGCGTGILSLFAARAGASRVVAVDGSAKMASVATQVAKNNGLLYDENVEAEQKQGSAQVISVVHTKAEELNQKIQVPQNGFDLLVSEWMGYCLLYESMLSSVIYARDHFLKPGGAILPDTAMIVSQLLPCILSCIFCCLTTRA

SEQ ID NO: 253 - DNA, 1067 bp, Zea mays
acgttcaaatccgctcccggcggatttgtcctactcaggagagcgttcaccgacaaacaacagataaaacgaaaggcccagtcttccgactgagcctttcgttttatttgatgcctggcagttccctactctcgcgttaacgctagcatggatgttttcccagtcacgacgttgtaaaacgacggccagtcttaagctcgggccccaaataatgattttattttgactgatagtgacctgttcgttgcaacaaattgatgagcaatgcttttttataatgccaactttgtacaaaaaagcaggcttaaacaatggctgacaatgccggtctagtaggcctgctcttggagcagcaccagctgcgcccaccagcagcagcatcaagagcaccacctcaaatcacaagcaaggccactcgtcccctcctcgccaccgccaagaacgacgtcgtcgacaagggcagctccgccgccgcttccttcagccgctcttcctcttcttcttcttcccgtgcaccggcgccgacggtgtcgccgacgaccgcctgccctttcctgcaccggtgcttcttctgccacggggagctcgccgacggcagggacatatacatgtacagaggcgagagggcgttctgcagcgaggagtgccgctgccgccatatcctggcagaggaggacgatgacgacactactacctcggtcggggtcgtggcagcggcagcggactgctccacccagctccgccatcaggcccttgctgccagcttcacgttctgaacccagctttcttgtacaaagttggcattataagaaagcattgcttatcaatttgttgcaacgaacaggtcactatcagtcaaaataaaatcattatttgccatccagctgatatcccctatagtgagtcgtattacatggtcatagctgtttcctggcagctctggcccgtgtctcaaaatctctgatgttacattgcacaagataaaaatatatcatcatgatcagtcctgctcctcggccacgaagtgcacgcagttgccggccgggtcgcgcagggcgaactcccgc

SEQ ID NO: 254 - protein, 154 aa, Zea mays
MADNAGLVGLLLEQHQLRPPAAASRAPPQITSKATRPLLATAKNDVVDKGSSAAASFSRSSSSSSSRAPAPTVSPTTACPFLHRCFFCHGELADGRDIYMYRGERAFCSEECRCRHILAEEDDDDTTTSVGVVAAAADCSTQLRHQALAASFTF

SEQ ID NO: 255 - DNA, 1180 bp, Zea mays
cggccagtcttaagctcgggccccaaataatgattttattttgactgatagtgacctgttcgttgcaacaaattgatgagcaatgcttttttataatgccaactttgtacaaaaaagcaggcttaaacaatgatcccctacgcgactgcggcggaggcggagggagcactggggcgcaccatgacgtgggctgagacagcatggtacgagtactcggcggtgatgccagattcctggctgcactgccacaccacatttatcctgttcgtcatctacagcatcgccccgctgcccctgctactcctagagcagttcgctccgtccgtcgtgctgccgtacaagctgcagccccgggtacggctgcccccggcagcctccctcagctgctacatggacgcggcctgcatctttccgctcgccgttggccttcagttcgtctcctatcctgcggtcgccaagatactaaggacccgaatgggactgccgttgccgtcggtgagggagaccatcgcgcagctagtcgtatactctctagtggaggattacctcagctactggatgcaccgtctgctgcacacccagtggtgctacgagaagatccaccgcgtccaccacgagttcacggctcctacaggcttcgccatgtcgtacagccactgggccgagaacgtcgtcctttctatcccggccttggccggcccagtgctcgtgccatgccatgtcaccacgcagtggctatggttctccatccgcctaattgagggcattaacacgcacagcggttaccatttcccgttcagcccttgcaggctgattccattctacggaggggctgcataccatgactaccatcactatgcaggaggccgtagccaaagcaactttgcacccctgttcacctactgtgattatttatataggacagacaaaggctacagataccacaagctaaagcaagagaagctgaagagtctagcagaaaatagtgcggataaaggaggcaactactcattcgacgaagggaaaaagaacagatatttttgtgcctgaacccagctttcttgtacaaagttggcattataagaaagcattgcttatcaatttgttgcaacgaacaggtcactatcagtcaaaataaaatcattatttgccatccagctgatatcccctatagtgagtc

SEQ ID NO: 256 - protein, 306 aa, Zea mays
MIPYATAAEAEGALGRTMTWAETAWYEYSAVMPDSWLHCHTTFILFVIYSIAPLPLLLLEQFAPSVVLPYKLQPRVRLPPAASLSCYMDAACIFPLAVGLQFVSYPAVAKILRTRMGLPLPSVRETIAQLVVYSLVEDYLSYWMHRLLHTQWCYEKIHRVHHEFTAPTGFAMSYSHWAENVVLSIPALAGPVLVPCHVTTQWLWFSIRLIEGINTHSGYHFPFSPCRLIPFYGGAAYHDYHHYAGGRSQSNFAPLFTYCDYLYRTDKGYRYHKLKQEKLKSLAENSADKGGNYSFDEGKKNRYFCA

SEQ ID NO: 257 - DNA, 747 bp, Zea mays
tgcttttttataatgccaactttgtacaaaaaagcaggcttaaacaatggccaaaatggtgttgctctgcgtgctcgtctccttcctcctgatgcccttggcctccctagccctgacgcaggacttctgcgtcgccgacctgacctgcagcgacacgccggcggggtacccgtgcaagtccagcgtcaccgccaacgacttctacttccacggcctggccggccagggcaaaataaacccactcatcaaggccgccgtgaccccggccttcgtgggccagttcccgggcgtcaacgggcttggcatctctgcggccaggctcgacatcgaggtgggcggcgtcgtgccgctgcacacccacccggcgggctcagagctcctcttcgtgacccagggcaccgtcgccgccggcttcatcagctccggctccaacaccgtctacaccaagacgctgtacgccggcgacatcatggtgttcccccagggcctgctccactaccagtacaacgccggcaccggcgctgccgtgggcctcgtcgccttcagcagccccaaccccggcctgcagatcaccgactttgcgctctttgccaacaacctcccgtccgccgtcgtggagaaggtcaccttcttggacgacgcgcaggtgaagaagctcaagagtgtgctcggcggcagcggttaaacccagctttcttgtacaaagttggcattataagaaagcattgcttatcaatttgttgcaac

SEQ ID NO: 258 - protein, 212 aa, Zea mays
MAKMVLLCVLVSFLLMPLASLALTQDFCVADLTCSDTPAGYPCKSSVTANDFYFHGLAGQGKINPLIKAAVTPAFVGQFPGVNGLGISAARLDIEVGGVVPLHTHPAGSELLFVTQGTVAAGFISSGSNTVYTKTLYAGDIMVFPQGLLHYQYNAGTGAAVGLVAFSSPNPGLQITDFALFANNLPSAVVEKVTFLDDAQVKKLKSVLGGSG

SEQ ID NO: 259 - DNA, 324 bp, Zea mays
atggcgaagggaggaggtggaggccagcgcgagggtagcgccctgaagagggcggcgatcgtcgcaggggggctcgcgctggcctgggtcaccgtggagaccgctttcaggcccttaatgggccgcctccgcgctgccatctccagctccaccgacaccgcccgcgaccccgaccaggaggagcctcccgcgcctgcctctgcggcggaggcggagaaggcgtccgcaccagaggagcctgccgcggtggaggagaaagtcgaggagaaggtggtcgagttggaggagaaggtggaggaggccgccgccgacaaggccgagtga

SEQ ID NO: 260 - protein, 107 aa, Zea mays
MAKGGGGGQREGSALKRAAIVAGGLALAWVTVETAFRPLMGRLRAAISSSTDTARDPDQEEPPAPASAAEAEKASAPEEPAAVEEKVEEKVVELEEKVEEAAADKAE

SEQ ID NO: 261 - DNA, 496 bp, Zea mays
acaaattgatgagcaatgcttttttataatgccaactttgtacaaaaaagcaggcttaaacaatgaagtcgagggcacggtccaccgccggcgactccaggctctcggtgaggaagaccaaggcagagaaggacccaaacaagcccaagaggcctccgagcgcgttcttcgtcttcatggaggagttcaggaaggactacaaggagaagcaccccaatgtgaagcaagtctccgtgattggcaaggctggtggtgacaagtggaagtccctgtctgatgccgagaaggctccctacgtgtctaaggcagagaagctcaaggctgagtacaccaagaagatcgacgcttacaacaacaagcagtctggagaccccacggcgtctggtgattccgacaagtccaagtccgaggtgaacgacgaggacgaggagggtgacgagtgaacccagctttcttgtacaaagttggcattataagaaagcattgcttatcaatt

SEQ ID NO: 262 - protein, 126 aa, Zea mays
MKSRARSTAGDSRLSVRKTKAEKDPNKPKRPPSAFFVFMEEFRKDYKEKHPNVKQVSVIGKAGGDKWKSLSDAEKAPYVSKAEKLKAEYTKKIDAYNNKQSGDPTASGDSDKSKSEVNDEDEEGDE

SEQ ID NO: 263 - DNA, 414 bp, Zea mays
atgggcctcctcgacaagctgtgggacgacaccgtcgcaggcccgcgcccggacaccgggctcggccgcctccgcaagcagcctgtgcgtcccgccgccgtcaagatcagtgatccggccggggacgctgcagcgttcgtgccgccctcgccggcttcgggtagcgaggagacgccggtgaaggtgacgcgcagcatcatgatcaagcgccccgcggggtacccgtcgtcgccgaggagcgcggcaagcacgccgccggcctcgccactggggactaccccgcccatctcgccgtttgccggcgccgctgtaagtagatgtttcattgatgatcttaagagcggaatactgagcctatctatggtcaagaggttgccaccatttcaaagcagagtcagtgaattagttagctga

SEQ ID NO: 264 - protein, 137 aa, Zea mays
MGLLDKLWDDTVAGPRPDTGLGRLRKQPVRPAAVKISDPAGDAAAFVPPSPASGSEETPVKVTRSIMIKRPAGYPSSPRSAASTPPASPLGTTPPISPFAGAAVSRCFIDDLKSGILSLSMVKRLPPFQSRVSELVS

SEQ ID NO: 265 - DNA, 1700 bp, Zea mays
gtgacctgttcgttgcaacaaattgatgagcaatgcttttttataatgccaactttgtacaaaaaagcaggcttaaacaatgtttccttggaactttgagctttggaagatgccaaggagaacaggaaatgctgctccaaccaaatcagttgaattggtcaaacaagaccaattggagtttgatgatcctgatgaggtagatgacgaggaagaagttgagtatgaagaaattgaggaggaggttgagtatgaagaggtagaggaggaggaggaggaggatgaggatgaggaggatgaagaaatggaaggtgtgcatgaaattgatgctaatgatgaaagtaaaatggtggatgctgatgggaaggttgagaatgaaaaagagaagcatgctgagcttcttgctcttcctcctcatggagctgaagtttatgttgggggcatatcttctgatgtatcttctgaagatctcaaacaactatttgaatctgttggagaagttgtggaagtgcgaatgcgaggaaagggggataacaggacttatgcttttattaatttcagaactaaagcgatggccttaaaggccatccaaaatttgagcaataaagacctaaagggaaagaagataaaagtttctccctcccaggctaagaacaggctatttattgggaatgtaccccatgactggacacatgatgatttcaaaactgcagtggaagaagttggtcctggagttttaaaagttgaactcatgaaggcgccaggcttagatcgcaataagggttatggctttattgaatactacaaccaggcatgtgcagagtatgctaagcagaagatgtctaccccagaattcaaactagatacgaatgctcctactgtcagctgggcagatcctaagaatgccaatgaagctacatctactgcacaggttaaatctctatatgtcaaaaacctccccaagactgttactcaagagcagctgaaaaagctgtttgagcatgttggagaaattacaaaagttgttgttccacctgcaaaatctgggcatgaaaatcggtacggttttgttcattttaaggagcggtacatggctatgaaggctctgaagaacactgagagatatgaactcgatggtcagctgctggattgttcacttgcgaaacctcctgctgataagaaggatagtactgtatcaacacctactgcaaaaggaggcccgttactcccaagttatgccccacttggatatggactggtgggagcttataatccacgtggaaagggattggcagatgcttataataacccccttggaaatggactggcaggtgcttatggtgtgctttccgctcgtgctgcacagccaatggtgtatgctccaggtgctcctcccggctcaacaatgatcccaatggtcctaccagatggccgtcttgtatacgtaccacaggccgcggggcagcagcctgtgcatgcgacttcacctctgccacagcaaggtggtcgtcgattcggtggtagtggcagcggtggtggcggatccagctcttccggcggaaagcggcagaggggagatgaccatggtagtaacagcaacaacagccgcaggggccggcaccgtccgtattgaacccagctttcttgtacaaagttggcattataagaaagcattgcttatcaatttgttgcaacgaacaggt

SEQ ID NO: 266 - protein, 516 aa, Zea mays
MFPWNFELWKMPRRTGNAAPTKSVELVKQDQLEFDDPDEVDDEEEVEYEEIEEEVEYEEVEEEEEEDEDEEDEEMEGVHEIDANDESKMVDADGKVENEKEKHAELLALPPHGAEVYVGGISSDVSSEDLKQLFESVGEVVEVRMRGKGDNRTYAFINFRTKAMALKAIQNLSNKDLKGKKIKVSPSQAKNRLFIGNVPHDWTHDDFKTAVEEVGPGVLKVELMKAPGLDRNKGYGFIEYYNQACAEYAKQKMSTPEFKLDTNAPTVSWADPKNANEATSTAQVKSLYVKNLPKTVTQEQLKKLFEHVGEITKVVVPPAKSGHENRYGFVHFKERYMAMKALKNTERYELDGQLLDCSLAKPPADKKDSTVSTPTAKGGPLLPSYAPLGYGLVGAYNPRGKGLADAYNNPLGNGLAGAYGVLSARAAQPMVYAPGAPPGSTMIPMVLPDGRLVYVPQAAGQQPVHATSPLPQQGGRRFGGSGSGGGGSSSSGGKRQRGDDHGSNSNNSRRGRHRPY

SEQ ID NO: 267 - DNA, 714 bp, Zea mays
atggccacggccggcggaggggccgggcatctgaagctgctgggcgcgtggccgagccccttcgtgaaccgtgtacgcatggcgctgcacctcaaggggctggagtacgagaacgtggaggaggacctcaccaacaagagcgacctgctcctcgcctccaaccccgtccacaagctcgttcccgtcctcctccacggcgacaagcccatctccgagtcactcgtcatcgtggagtacctcgacgacgccttccccggcgctggccaggccgtcctccccgccgacccctatgaacgcgccgtcgctcgcttctgggccaaatacgtcgacggcaagttgcacggcatgatggtgaaggcgctcatgggggcaacggaggaggagagggcgacggcgacggtggacgcgctggccgctatggacacgctggagggcgcgttcgccgagtgctccggcgggaaaaagttcttcgccggcgacgcgcccgggtacctggacgtcgcgctgggaggcttcatcggctggctgcgcgcctgggacaaggtggggggcgtcaagctgctggacgccggccgggtcccgcgcctggccacgtgggcggagcgcttcgccgcgctcgacgtagccaaggaggtcatcccggaccccgaccacatcgccgagtttgccaaggtgctgcaggcacgctccgcggcagctgccaccagcaactga

SEQ ID NO: 268 - protein, 237 aa, Zea mays
MATAGGGAGHLKLLGAWPSPFVNRVRMALHLKGLEYENVEEDLTNKSDLLLASNPVHKLVPVLLHGDKPISESLVIVEYLDDAFPGAGQAVLPADPYERAVARFWAKYVDGKLHGMMVKALMGATEEERATATVDALAAMDTLEGAFAECSGGKKFFAGDAPGYLDVALGGFIGWLRAWDKVGGVKLLDAGRVPRLATWAERFAALDVAKEVIPDPDHIAEFAKVLQARSAAAATSN

SEQ ID NO: 269 - DNA, 1172 bp, Zea mays
tcgttgcaacaaattgatgagcaatgcttttttataatgccaactttgtacaaaaaagcaggcttaaacaatggatttgggctcgtgctacctcggtgggaacgccgacgcggtggagttctgtccgcaccgcccgttccgccacgtgctggccgccgccacctacacgctgcaggagcaggagcgcgaccgggcgggcagcatatccctcttctcagttgacgttgcctcggaggacgcgtcccggaggctccagctgctgcatactgtggagaccgccggcatcttcgatatgaagtggagccccaagtcgccgctgctcgcgcaggccgacgcccacggccgcctcgcgctccggcgcttggagcaggaggacggctcggacacaggcattctcctcacagatgtctctgctgaagatatttcttcttcaatgtgcttatatgtggactggaaccaaactgcggagtctctgtctgttggattatcagatggctcactgtctctggtttcagtgagagaggaccggctggagatatcacaacagtggactgcacatcagttcgaagtctggacatgctattttgatcgtacaagtccacacttgctgtacagtggatcagatgactgttgtttcagttgctgggacttgagagaaagcccaccaaacattgtttttcaaaacaaaaaatctcataagatgggtgtctgttgtattacacagaatccgttggagtggaacatgctacttactgggagttatgatgaatttctcagagtttgggacatgagatttatggcaaaacctgtcaatgaaaagttgataaatctaggaggtggtgtgtggaggatgaagtatcatcctagtattgcagatgttgtattggctgcgtgcatgcacaatgggtttgccattgtaaaagtaggttctggagatgctacgataatggaaacatattgcaagcatgagtccttagcatacggtgcagattggcagaaaagtgaagaggtggagcaaaatggaaattcttcagttgttgctacttgttcgttttatgatcgcctcctccgcgtgtggcaaccagagaatctagctgagctttaaacccagctttcttgtacaaagttggcattataagaaagcattgcttatcaatttgttgcaacgaaca

SEQ ID NO: 270 - protein, 344 aa, Zea mays
MDLGSCYLGGNADAVEFCPHRPFRHVLAAATYTLQEQERDRAGSISLFSVDVASEDASRRLQLLHTVETAGIFDMKWSPKSPLLAQADAHGRLALRRLEQEDGSDTGILLTDVSAEDISSSMCLYVDWNQTAESLSVGLSDGSLSLVSVREDRLEISQQWTAHQFEVWTCYFDRTSPHLLYSGSDDCCFSCWDLRESPPNIVFQNKKSHKMGVCCITQNPLEWNMLLTGSYDEFLRVWDMRFMAKPVNEKLINLGGGVWRMKYHPSIADVVLAACMHNGFAIVKVGSGDATIMETYCKHESLAYGADWQKSEEVEQNGNSSVVATCSFYDRLLRVWQPENLAEL

SEQ ID NO: 271 - DNA, 2085 bp, Zea mays
atggagagagaaccgcgggagctgagggagaaagaagctgggcgcggcgctgggagatccggtgagccgagagggaggctgcgcgccgtgggagctggagcagcgcgcgacacagagaaccggagggcgcgcaggctgggagctcggccgccatgggcaagtgcagggaagaacgcgacgcgccagggaagagcagaggtcgggggcgagctcggcacggcgcgtgcgcaagaagcagctcggcacggcgcggctggggaagaagacgcgctggggaagagagcggcgatgggaaccgggcgcgggaggagcagaggccgaggagcggcgggagacgaccaccttcacgaaattggctgcgcggttggccttgctggagtcggcgagcgcgttcttgcgctgcggagtaatatagtggcgaagccgcgcgacgagattgttacaaactcaaataactcctccccctcactcccaaaaccccaaactcctctgggctcttgtcctccctccctctccagccgccgccgccgccgccgccgccgcccagagccgagcatgccgggtgccttccactccctcctccttcccctcaaacggaagcgcaaatccaaacgccgcagcagacgcggtcaccgaaaggagaacaaccccaacatatccaagaaccacctcgccgccgctggagacccgtccttccacctgaaaagctgcacctctgtctcccccagagacatcggactccttgtccagccgctcggcaacctcttcctctccgccaccccgcgagctaacctccgggacgcggggctcggcgcgctccggcctcttccagacgacctgctcctcgacgtccttggcttgctccccgcgcgcgacctcgcggcgctctcggtggcgtccaaggcgctctacgtcgtcgcctcccacgacccgctctggcggaccctcgtcctcgacgagctcggcggcgccttcgacttcgccggatcctggcgcgccacctacatcgccgccgcctccggcggccaggcctacctcatccctcctcgcgctctgagaatcaagggcttctactccgactacctcttccagagctggctctgtgccaacatggagatgcggcacgagtggcttgcgcgcgacaacatcgagcgccgccgcggcttgtcggtggagcagttcattgccgaggtcgaggagcccaacaggccggtgttgctagaggggtgcattgatatgtggccggcgttacagaaatggaacagagactacctgctggagatctcagcgggtaaggagttcgcggtcgggccagtgagcatgccattagataggtacttccggtatgctgacaatgtccaggaggagaggccattgtacttgttcgatgcgaagtttgctgagagagtaccagagatggggagggactatgaggttccggtgtacttcagggaggacctgtttagtgttcttgggaaggagaggccggattacagatgggttatcattggaccagctgggtctggttcatcgttccatgttgatccgaactcgacatccgcatggaatgctataatcaagggggctaagaagtgggtgatgttcccaccagaggttgtgccgcctggtgtccacccgagtgctgatggagcagaggtcaccagccctgtgtctatcatggagtggttcatgaacttctatggggcttgtgagacctgggaaaagaggcctatcgagtgtgtgtgccgatctggggaggtggttttcgtgcctaatggatggtggcatttggtgatcaatcttgaggagtcaattgccattacccagaattatgtgagcaggaggaatttgttgaacgttattgatttcctcaagaagcccaacgcaagtgagcttgtctctgggactgaagacagagtgaatctgcacaacaagttccgtggtgccatcgaggcagctcacccgggcatgatcaagcggctcgagcttgaggctcagcagaaggccgctgctcggaagaagaaagcgtcgttctgggattctgctgtcgatgccaagaatggaggattcaagttctccttctga

SEQ ID NO: 272 - protein, 694 aa, Zea mays
MEREPRELREKEAGRGAGRSGEPRGRLRAVGAGAARDTENRRARRLGARPPWASAGKNATRQGRAEVGGELGTARAQEAARHGAAGEEDALGKRAAMGTGRGRSRGRGAAGDDHLHEIGCAVGLAGVGERVLALRSNIVAKPRDEIVTNSNNSSPSLPKPQTPLGSCPPSLSSRRRRRRRRPEPSMPGAFHSLLLPLKRKRKSKRRSRRGHRKENNPNISKNHLAAAGDPSFHLKSCTSVSPRDIGLLVQPLGNLFLSATPRANLRDAGLGALRPLPDDLLLDVLGLLPARDLAALSVASKALYVVASHDPLWRTLVLDELGGAFDFAGSWRATYIAAASGGQAYLIPPRALRIKGFYSDYLFQSWLCANMEMRHEWLARDNIERRRGLSVEQFIAEVEEPNRPVLLEGCIDMWPALQKWNRDYLLEISAGKEFAVGPVSMPLDRYFRYADNVQEERPLYLFDAKFAERVPEMGRDYEVPVYFREDLFSVLGKERPDYRWVIIGPAGSGSSFHVDPNSTSAWNAIIKGAKKWVMFPPEVVPPGVHPSADGAEVTSPVSIMEWFMNFYGACETWEKRPIECVCRSGEVVFVPNGWWHLVINLEESIAITQNYVSRRNLLNVIDFLKKPNASELVSGTEDRVNLHNKFRGAIEAAHPGMIKRLELEAQQKAAARKKKASFWDSAVDAKNGGFKFSF

SEQ ID NO: 273 - DNA, 1653 bp, Zea mays
atgatgagagtggccgtggtcggtggtggcctaagcgggctagtggcggcgcatgagctggcgaggagcggcggcgcacgcgtcaccgtgtacgagaaggaggaccatctcggcggcgccaagaccgtcgccgtcaatggtggatcaggccctgttctggtcgacctcgacttcatggtcttcaaccgggtgacgttctcaaacatgatggaatggtttgaacgtctgggggtggaaatggagaaatcggacatgtcattctcagcaagcttacggttaaacgaaggtaaaggctttgagtggggtacccgcaatggtatatctagtgttctggtgcagaagagtaatttgcttagccccagattctggctcatgatcaatgagatattcaagttcaagaaccatgccctcaagtaccaagaggactatgcacgaaaccctgacaagaatgagactttcggtcaatttattcagtcacatagatattcacagctgttccaggatgcttaccttatcccaatgtgcgcatgcatttggtcctgtccaccacagaacatatttggcttccctgctggttttgtgctttcatttttttgtgataatcatcttctcgagttgtttagtcccctacagtggctaaatgtcaaaggtggttctgggtgctacgtgaaaaaggtaagagaggaattggagagcatgggttgtcaaattaaaaccggatgtgaagtgagatcagtttcaagatttaatggaggttaccggattttggaggctgatggctcagaagagatgtatgacaggatcatattttgtgttcatgctcctgatgctctaaaaatactaggagaagaagcaacacctcatgaacggagagttctaggagctttccagtatatctacagcgatttgtatttccactgtgatgaaagttttatgccacgtaattcttctgcatggagtgcgatgaacttcttggggactacaagcagtggtgtttgtgttacctactggttaaatatacttcagaacattgaatctgccggacctttccttgcaacacttaaccctcctcgtgttcccgatcatgtattgctaaaatggcacactaggcacccgattccttccatggctgctgcaagggctactcttgagctcaatagcatacaagggaagaggggaatatggttctgtgtcccatatcaacaaggttatggaaatcatgaggacagcgtgaaggctgggaaagcagtaactttagggttgcttggcaagaaatgtgaccttttggtgaacccgaaacccatgatcgtcccatcatggactgaggccggcgtacgatatatggtggcaaaaaatctaggaaaattcataaccattggtaacttcagcatgctcgaagatggaggcacttctcttagttttggcaaaacatgtgaaagatgtcaactaaaatgtgtgatacgggttcacaacccccagttctattggaagattgcaaccgaaggagaccctggttttgcatattcctacatcaatggttatatctcgtttgttgataaaaaagaaggcatccagaatattgtcgagattattattgctaacagaggtgaacggaaaaggttgagcagtacccgtgccaggaataaaaggtaa

SEQ ID NO: 274 - protein, 550 aa, Zea mays
MMRVAVVGGGLSGLVAAHELARSGGARVTVYEKEDHLGGAKTVAVNGGSGPVLVDLDFMVFNRVTFSNMMEWFERLGVEMEKSDMSFSASLRLNEGKGFEWGTRNGISSVLVQKSNLLSPRFWLMINEIFKFKNHALKYQEDYARNPDKNETFGQFIQSHRYSQLFQDAYLIPMCACIWSCPPQNIFGFPAGFVLSFFCDNHLLELFSPLQWLNVKGGSGCYVKKVREELESMGCQIKTGCEVRSVSRFNGGYRILEADGSEEMYDRIIFCVHAPDALKILGEEATPHERRVLGAFQYIYSDLYFHCDESFMPRNSSAWSAMNFLGTTSSGVCVTYWLNILQNIESAGPFLATLNPPRVPDHVLLKWHTRHPIPSMAAARATLELNSIQGKRGIWFCVPYQQGYGNHEDSVKAGKAVTLGLLGKKCDLLVNPKPMIVPSWTEAGVRYMVAKNLGKFITIGNFSMLEDGGTSLSFGKTCERCQLKCVIRVHNPQFYWKIATEGDPGFAYSYINGYISFVDKKEGIQNIVEIIIANRGERKRLSSTRARNKR

SEQ ID NO: 275 - DNA, 975 bp, Zea mays
atggcggggttccctctaggcggaggaagccacacccagagccgcgacgcgcccgcctcgtccgtcccgccggtgcatccctccgacgccgcgtccttcctctacgcggcgcgcgcgggagcgggcctgcagctatggcagcagcagcagcaacacccgttctacaactccaacatcatccgcttctccgatgatccacccggcgccgcgccctcgctcacgggcgccgcgtcgccgtcgtcgccgtcgcgcggcccgagggccggcgggggaagcggcggcggcggcggggtcagctgccaggactgtggcaaccaggccaagaaggactgcgtgcaccagcgctgccgcacctgctgcaaaagccgcggcttcgcctgcagcacccacgtcaagtccacctgggtctctgctgccaagagacgcgagcgccagcagcagctcgccgcgctcgcggcctccgccggcgacacagccgcggccgccggcccgtcccgcgacccgaccaagcgcccgcgcgcacgcctctccgtcgccaccccgacgaccacgtcctcgggggatcagcagatggtcacggtcgccgagaggttcccgagggaggtgagctcggaggcgctgttccggtgcgtgcgcctggggccggtcgaccgggccgaggcggaggtcgcgtaccagaccaccgtcagcatcggcggccacgtgttcaagggcatcctccacgacgtcggccctcgtagcttgcctgccgctggaggcggcgccgccgccgccgccatcgagtactacttccgccacgccgcggacggatcgccgccgagcaccacaggcgccgctggcgaagcgtgcggcgccggtggtgtgggcaatgtcgtcgtgtcatcggctgtggtgatggacccgtacccgacgcccggaccctacaccgccttcctgcctggcgcgccgttcttcccaggccacccgagacagtga

SEQ ID NO: 276 - protein, 324 aa, Zea mays
MAGFPLGGGSHTQSRDAPASSVPPVHPSDAASFLYAARAGAGLQLWQQQQQHPFYNSNIIRFSDDPPGAAPSLTGAASPSSPSRGPRAGGGSGGGGGVSCQDCGNQAKKDCVHQRCRTCCKSRGFACSTHVKSTWVSAAKRRERQQQLAALAASAGDTAAAAGPSRDPTKRPRARLSVATPTTTSSGDQQMVTVAERFPREVSSEALFRCVRLGPVDRAEAEVAYQTTVSIGGHVFKGILHDVGPRSLPAAGGGAAAAAIEYYFRHAADGSPPSTTGAAGEACGAGGVGNVVVSSAVVMDPYPTPGPYTAFLPGAPFFPGHPRQ

SEQ ID NO: 277 - DNA, 688 bp, Zea mays
tgatgagcaatgcttttttataatgccaactttgtacaaaaaagcaggcttaaacaatgctcaagctcgccaaggaggccggcagcatcctgttcgactaccggatcccgctggcggggacggacacgtgcagcgcgctggcgggcgcggcggacagcaacggcggcggcgtgcacaaggcggggatggtcatgaacgggctgcccatcagcgtgtacgcgccggagacggtggggtgcgcggtggtggacgcgacgggggcctgcgcggcggccacgtccacgggcgggctcatgaacaagatggccggccgcatcggggactcgccgctcatcggctccggcacctacgcgtgcggcgcctgcgccgtgtcgtgcacgggcgagggcgaggccatcatccgctgcacgctcgcgcgcgacgtggccgccgtcatggagtacaagggcctgcccctgcaggaggccgtcgactactgcgtcaaggagcgcctcgaccagggattcgccggcctcatcgccgtctccggcaccggcgaggtggcgtacggattcaactgcaccggcatgttccggggctgcgccaccgaggacgggttcatggaggtcggcatctgggagtgaacccagctttcttgtacaaagttggcattataagaaagcattgcttatcaatttgttgcaacgaa

SEQ ID NO: 278 - protein, 188 aa, Zea mays
MLKLAKEAGSILFDYRIPLAGTDTCSALAGAADSNGGGVHKAGMVMNGLPISVYAPETVGCAVVDATGACAAATSTGGLMNKMAGRIGDSPLIGSGTYACGACAVSCTGEGEAIIRCTLARDVAAVMEYKGLPLQEAVDYCVKERLDQGFAGLIAVSGTGEVAYGFNCTGMFRGCATEDGFMEVGIWE

SEQ ID NO: 279 - DNA, 1099 bp, Zea mays
aaaggcccagtcttccgactgagcctttcgttttatttgatgcctggcagttccctactctcgcgttaacgctagcatggatgttttcccagtcacgacgttgtaaaacgacggccagtcttaagctcgggccccaaataatgattttattttgactgatagtgacctgttcgttgcaacaaattgatgagcaatgcttttttataatgccaactttgtacaaaaaagcaggcttaaacaatgtacttgtcaacatcattggtcgtcttgcaccacgctaccttgccatatcccggtgcgtttgcaagacatggtgcaccaccattgatgcccataatctgctgcgtatggatctactcccacactcagtgtctggactctttattaacttcaatgagttaagcatgtcggaattcttatcccgcccctcaaaaggaccagcaatatctggtaaatttgactatttgcctagcgcgggccaagtcatagaccactgcaacgggctcatcttgttacacgaatgtgtagttaacccggccacacgacagtgggcgctgctgcccccacgcccaagcccaaatatgcctgagcacttttgtcacgggatgtaccttgtctttgaccccacattgtcatcacattatgaggtattcctgatccctcaggtctcatacaattccaacttagaccctgcaatagaggaattggaatggccaccttcgccttgcatcgtacaagtgttgtcatcaaggacaaagttgtgggaggagaggttgtttgttcgagaaggagaggctgcaggtaatgtcgctgacattcggttggattttcaagctgttcaggagaatgctgtctattggcggggagtactttatgtaaattaccaatccaaatttattatgaggtagacccagctttcttgtacaaagttggcattataagaaagcattgcttatcaatttgttgcaacgaacaggtcactatcagtcaaaataaaatcattatttgccatccagctgatatcccctatagtgagtcgtattacatggtcatagctgtttcctggcagctctggcccgtgtctcaaaatctctgatgt

SEQ ID NO: 280 - protein, 115 aa, Zea mays
MYLSTSLVVLHHATLPYPGAFARHGAPPLMPIICCVSYNSNLDPAIEELEWPPSPCIVQVLSSRTKLWEERLFVREGEAAGNVADIRLDFQAVQENAVYWRGVLYVNYQSKFIMR

SEQ ID NO: 281 - DNA, 1257 bp, Zea mays
atggccgagcccgccaaccggcggatggaggccgtccgccgtcacctccttctgccttcacccgcgccgcttcgccctaatccgttaagcagcctcgcggaggtggagcccagcccggtgatcattggcgggatggtgctggatatccatgccaagccttccgtgccgccccatcatggtaccactgtccctggaatggttaaatacatcagtggaggcgtagcaagaaatattgctgagtgcatgtcaaagcttgggacacaacccttcatgataagtgttgttggaaatgatttggcaggggacttccttttgaagtactggaggtcagctggattatgttcagaaggaattctgcaggttgataatgttgcaaccccagtagtatcaaatgtgtttgacggtactggagaattaatcgctggagttgcaagtgttcaagcagttgaaaattttattacttcgagctggatttatcacttccgtcatcatattgctaatgcaccacttgtaatgcttgatgcgaatttatctcctgagtcacttaaagcagcttgcataatggcatatgaatttggggtgcctgtgttatttgagccagtctcagtggtgaagtgtcgaagaattgcaccagttgcagaatatataacttgcacttcccccaatgaaattgagcttgttgccatggcaaattcattatctccatcagtgaaatataattttcacacaatagagcagttcaaggagaaagcagatactgttgaatatatttttcaaatgcttagcccagcaatgttcttcctacttgagaagggcatcaagttgcttatcgtgacacttggctcaaatggtgtttttatttgttgcaaagagcacactaacttcatgaaagaccagcacaagtgcaaacagacgcctttctccagacagctacttgaaaaaatggacgggtgttttccatcgaacaatcttgttaatttgtgcagagaaagctcttcaagaacatgtgtttttcatttacctgcaatatcggcctctgtgataagcctcacaggtgctggcgattgtttggttggtggtgccctttcagctctatgtgcaggcttcgatatcatccagagcgttgcagttggggttgctatagcaaaggcatctgtggaatctgaagccaacatacctgatgacatttctgctgcgagtattgcagatgatgcacaaagtgtattgcattctgctaaggtgctttggtgcaaatga

SEQ ID NO: 282 - protein, 418 aa, Zea mays
MAEPANRRMEAVRRHLLLPSPAPLRPNPLSSLAEVEPSPVIIGGMVLDIHAKPSVPPHHGTTVPGMVKYISGGVARNIAECMSKLGTQPFMISVVGNDLAGDFLLKYWRSAGLCSEGILQVDNVATPVVSNVFDGTGELIAGVASVQAVENFITSSWIYHFRHHIANAPLVMLDANLSPESLKAACIMAYEFGVPVLFEPVSVVKCRRIAPVAEYITCTSPNEIELVAMANSLSPSVKYNFHTIEQFKEKADTVEYIFQMLSPAMFFLLEKGIKLLIVTLGSNGVFICCKEHTNFMKDQHKCKQTPFSRQLLEKMDGCFPSNNLVNLCRESSSRTCVFHLPAISASVISLTGAGDCLVGGALSALCAGFDIIQSVAVGVAIAKASVESEANIPDDISAASIADDAQSVLHSAKVLWCK

SEQ ID NO: 283 - DNA, 1470 bp, Zea mays
atgggttcgctgccgccggtggacgggcagagacgccccccacacgttgtgatgatcccgtacccggcgcagggccacatcacgccgatgctgcagtttgccaagctcctccatactcgcggcttccacgtcaccttcgtcaacaacgagttcaatcatcgacgccacctgcgtgcgcgagggcccaacgcgctcgacggcacggatgggtttcgcttcaccgccatcgacgacggtctcccgctctttgaagcggacgccacccaggacatccccgcgctctgccactccaccttgaccacctgcctgccccggtttaaggatctcatcgccaggattaacgccgaggctgaggccgagggacaacccaccgtgacatgcgtcgtcggcgacagcaccatgaccttcgcgctccgcgccgcgcgagagctcggcctccgctgcgctacactctggaccgccagcgcctgcggcttcatcggctacttccactaccgccacctcgtcgagcgtggtatggtccccctcaagaacgaggagcagctcacggacgggtacctagacaccatcgtcgactggatcccgggcgcgcccaaggacctgcggctccgggacttcccgagcttcgtgcgcaccacggatccgaacgacgtcatgctcaacttcttcatccacgagacggagggcatgtcgcaggcgtcggcggtggtcatcaacaccttcgacgagctcgacgcgacgctgctcgctgccatggcgaagctcctgccgcccatctacaccgtgggcccgctccagctgacggtgcggaacaacgtgcaggcgaacagtcctgtcgctgctattgggtccaacctgtggaaggagcaggaggcgccgctccggtggctcaacggccgtgcgccgcgctccgttgtgtatgtcaacttcgggagcatcacggtgatgtccaacgagcagctggtcgagttcgcgtgggggctggccaacaccggctactacttcctatggaacgtacgcccggacctcgtcaagagtggcgactccgccgggctgccgccagagttctcagctgcgacagagggacgaagcatgctgtctacgtggtgcccgcaggcagctgtgctggagcatgatgccgtgggggtgttcctgacgcactccgggtggaactccacgctggagagtatttgcggcggcgttcccatgctgtgctggcccttcttcgccgagcagcagaccaactgccgatacaagtgcaccgagtggggcatcggaaaagagatcggtgacgatgtacagcggggcgaggtagagtcgctcatacgggaggccatggagggggagaaagggcaagagatgctccggcgcgtgactgaactcagggacagcgccgtggccgctgcagggcctgacggacggtctatgcgcaacgtagacaggctcatcgaagaggtgctcctagcctag

SEQ ID NO: 284 - protein, 489 aa, Zea mays
MGSLPPVDGQRRPPHVVMIPYPAQGHITPMLQFAKLLHTRGFHVTFVNNEFNHRRHLRARGPNALDGTDGFRFTAIDDGLPLFEADATQDIPALCHSTLTTCLPRFKDLIARINAEAEAEGQPTVTCVVGDSTMTFALRAARELGLRCATLWTASACGFIGYFHYRHLVERGMVPLKNEEQLTDGYLDTIVDWIPGAPKDLRLRDFPSFVRTTDPNDVMLNFFIHETEGMSQASAVVINTFDELDATLLAAMAKLLPPIYTVGPLQLTVRNNVQANSPVAAIGSNLWKEQEAPLRWLNGRAPRSVVYVNFGSITVMSNEQLVEFAWGLANTGYYFLWNVRPDLVKSGDSAGLPPEFSAATEGRSMLSTWCPQAAVLEHDAVGVFLTHSGWNSTLESICGGVPMLCWPFFAEQQTNCRYKCTEWGIGKEIGDDVQRGEVESLIREAMEGEKGQEMLRRVTELRDSAVAAAGPDGRSMRNVDRLIEEVLLA

SEQ ID NO: 285 - DNA, 720 bp, Zea mays
atggtgaagacggcggcgagcagcagcagcgacgacgccgccgccgccaagaggaggacgtacaagggcgtgcggatgcggagctggggctcgtgggtgtcggaggtgcgagcgcccggccagaagacgcggatatggctcggctcccacgccaccgccgaggccgcggcgcgcgcgcacgacgccgcgctgctctgcctccggggctcggcggccgacctcaacttcccgctccgcctcccgttcgacctgccccccgcggccaccatgtcgcccaaagccatccagcgcgtggccgccgccgccgccagcgcctcctcctcctcctcctgcggcggtggcggcggcttgcgcgcgccgccgcccttcgcgccacgcgccgagaacaacggcaccagtgcctgcagcgacggcgacggcgacgccaccccggcgtcgagcaccaccagctcgcccaccagccacgccgacgacgtctcctccccggactccaccgtcagcagcgccggcgacgtcgactactacacctcgctcgcggacatcgacgccttcttccagtcgcccaagtgcgtggtggactacgccctcatggacccctgcagcgccttcttcgcgccggactcgacggcggccgacgacgacggcggctgctgctgggcctgggaggaggacggcggcggcattgcgctctggagcttctccgctacactggactgctga

SEQ ID NO: 286 - protein, 239 aa, Zea mays
MVKTAASSSSDDAAAAKRRTYKGVRMRSWGSWVSEVRAPGQKTRIWLGSHATAEAAARAHDAALLCLRGSAADLNFPLRLPFDLPPAATMSPKAIQRVAAAAASASSSSSCGGGGGLRAPPPFAPRAENNGTSACSDGDGDATPASSTTSSPTSHADDVSSPDSTVSSAGDVDYYTSLADIDAFFQSPKCVVDYALMDPCSAFFAPDSTAADDDGGCCWAWEEDGGGIALWSFSATLDC

SEQ ID NO: 287 - DNA, 864 bp, Zea mays
gccccaaataatgattttattttgactgatagtgacctgttcgttgcaacaaattgatgagcaatgcttttttataatgccaactttgtacaaaaaagcaggcttaaacaatggcggctcgcgtcctcgcggccctcgcccttgccctcgccctcgccctcgtcgccgtacccgctcccacgcgggcgtccaacgacgagggggacgcgctctacgcgctgcggcagcggctgtcggaccccaacggcgtgctgcagagctgggatcccacgctcgtcaccccctgcacctggttccacatctcctgcgaccaggtcggccgcgtcgtccgcctggacttgggcaactccaacgtctccggctccatcggccctgagctcggccgccttgtcaacctcaagtacctggagctgtacaggaacaaccttgacggcgagatccccaaggaattgggcaacctcaagaacctgatcagcttggatctgtatgccaacaagctcacgggaggaatccccaagtcactctccaagctcgactcactcagattcatgcgcttgaacaacaacaagcttacaggatcaattccaagggagtttgccaagctctccaacctgaaagtcatcgatttgtctaacaatgatctctgtggaactatccctgttgatgggcctttctcaacctttcctctccgaagctttgagaacaacagcaggctcaacggtccagagctacaaggattggttccttatgattttggatgttagacccagctttcttgtacaaagttggcattataagaaagcattgcttatcaatttgttgcaacgaacaggtcactatcagtcaaaataaaatcattatttg

SEQ ID NO: 288 - protein, 217 aa, Zea mays
MAARVLAALALALALALVAVPAPTRASNDEGDALYALRQRLSDPNGVLQSWDPTLVTPCTWFHISCDQVGRVVRLDLGNSNVSGSIGPELGRLVNLKYLELYRNNLDGEIPKELGNLKNLISLDLYANKLTGGIPKSLSKLDSLRFMRLNNNKLTGSIPREFAKLSNLKVIDLSNNDLCGTIPVDGPFSTFPLRSFENNSRLNGPELQGLVPYDFGC

SEQ ID NO: 289 - DNA, 942 bp, Zea mays
atgggcggcggcggcggcatcgcggcctcctccctacccggccatgtactcgagcgtgttcggcggcatcatcctggacccggccatgatgttctccccatcgacgaccacatggtccaccggggccacggcgtgttcgacacggccatgatcctggacggcgccctgtacgagctggacgcgcacctggaccgcttcctccggtcggccgcggcggcgcgcgtgggcacggccccgttcccgcgcgaggcgctgcggcgcatcctgatccagatgaccgccgcctcgggctgccgcatgggctccatccgctactggctcagctccgggcccggcgacttcctgctgtcctccaggggctgcccgtcgccggcgttctacggcgtggtgatcgcgtcggagtacgagcagtgcggggtggacggcaccggggtgcgcgcggtcacggccacggtgcccatgaagccgccgcagttcgcgaccgtgaagaacgtgaactaccttcccaacgtgctgtccatcatggacgccgaggaccgcggcgccttcgcgtccgtgtgggtggacgaccaagggtacgtggccgagggccccatggtgaacgtggcgttcgtgacgcccgagcgggagctcgtgctcccggccttcgacaagatcctcagcgggtgcacggccaagaggatgctcgcgctggcgcctcgcctcgtggacgccggcctgctcgcgggcgtcagcaccagggacatcacagccgaggacgccaagcgcagcgccgagatggcgttcgtcggcagcggcctccccgtgctgcccgtcgtcgagtgggacggcaaacccatcggagacgggaaggttgggaagctgatgccggcgctgtctgatctgctgtgggaggacatgaagtccggtcccgacaggatccccgttccatacaagcagtag

SEQ ID NO: 290 - protein, 313 aa, Zea mays
MGGGGGIAASSLPGHVLERVRRHHPGPGHDVLPIDDHMVHRGHGVFDTAMILDGALYELDAHLDRFLRSAAAARVGTAPFPREALRRILIQMTAASGCRMGSIRYWLSSGPGDFLLSSRGCPSPAFYGVVIASEYEQCGVDGTGVRAVTATVPMKPPQFATVKNVNYLPNVLSIMDAEDRGAFASVWVDDQGYVAEGPMVNVAFVTPERELVLPAFDKILSGCTAKRMLALAPRLVDAGLLAGVSTRDITAEDAKRSAEMAFVGSGLPVLPVVEWDGKPIGDGKVGKLMPALSDLLWEDMKSGPDRIPVPYKQ

SEQ ID NO: 291 - DNA, 1211 bp, Zea mays
taagctcgggccccaaataatgattttattttgactgatagtgacctgttcgttgcaacaaattgatgagcaatgcttttttataatgccaactttgtacaaaaaagcaggcttaaacaatggccggcacgtgcgcccacgtcgagttcctccgcgcgcagccggcttgggcgctggtgctggccgccgtgggcctgctcgtggccgtccgcgccgctgcccgcttcgcgctctgggtctacgccgcgttcctccgcccggggaagcccctgcgccgccgctacggcgcctgggccgtcgtgacgggcgccaccgacggcatcggccgcgccgtcgcgttccgcctcgccgcggccgggctcgggctcgtcctcgtcggccgcaacccggagaagctggccgccgtggccgccgagatcagggccaagcaccccaaggtccccgaggtgcgcaccttcgtgctcgacttcgccagcgaggggctcgcggccggcgtcgaggcgctcaaggactccatccgtggcctcgacgtcggcgtgctcgtcaacaacgccgggctgtcctacccgtacgcgcgctacttccacgaggtggacgaggagctgatgcgcagcctcatccgggtcaacgtcgagggcgtcacgcgggtcacgcacgccgtgctgccaggcatggtcgagcggaagcgcggcgccattgtcaacatcggctccggcgccgcctccgtcgtgccttctgatccgctctactccgtctacgccgccaccaaagcgtatgttgaccaattctcaagatgcctctatgttgagtacaagagcaagggtattgatgtgcaatgccaggtgcccctatacgtggcgacaaagatggcatctatcaggaagtcttccttcatggttccatctactgacacctatgctcgtgctgccgttcgtcacattggatacgagcctaggtgcacaccgtactggccacactctgtcgtgtggttcttgatctcgattcttcctgagtcccttatagacagcgtgcgcctgggcatgtgcattaagatccgcaagaaggggctggccaaggacgccaagaagaaggcactgtgaacccagctttcttgtacaaagttggcattataagaaagcattgcttatcaatttgttgcaacgaacaggtcactatcagtcaaaataaaatcattatttgccatccagctg

SEQ ID NO: 292 - protein, 326 aa, Zea mays
MAGTCAHVEFLRAQPAWALVLAAVGLLVAVRAAARFALWVYAAFLRPGKPLRRRYGAWAVVTGATDGIGRAVAFRLAAAGLGLVLVGRNPEKLAAVAAEIRAKHPKVPEVRTFVLDFASEGLAAGVEALKDSIRGLDVGVLVNNAGLSYPYARYFHEVDEELMRSLIRVNVEGVTRVTHAVLPGMVERKRGAIVNIGSGAASVVPSDPLYSVYAATKAYVDQFSRCLYVEYKSKGIDVQCQVPLYVATKMASIRKSSFMVPSTDTYARAAVRHIGYEPRCTPYWPHSVVWFLISILPESLIDSVRLGMCIKIRKKGLAKDAKKKAL

SEQ ID NO: 293 - DNA, 1152 bp, Zea mays
tgattttattttgactgatagtgacctgttcgttgcaacaaattgatgagcaatgcttttttataatgccaactttgtacaaaaaagcaggcttaaacaatggcggcgccggcggccgacgatgactcggcatccccaggctacgtcctccgctccacacttgaggggcaccgccgcgccgtatcaacagttaagttctccccggatggccgccttctcgcctccgcctccgccgacaagcttcttcgcgtgtggtcttcctccgatctcacccccgttgcggagctcgagggccatggagagggtgtctcagacctctctttctcccccgacggccgcctccttgcttccgcctccgatgatcgcaccgtccgcatctgggacctcgccgtcggcggaggggcccgcctcgtcaagacgctcacgggccacaccaactacgccttctgcgtctccttcagcccccatggcaacgtcctcgcctccgggtcctttgacgagacggtgcgcgtgtgggaggtcaggtccggtaagtgcctccgcgtgctgccggcccattctgaacccgtcaccgccgtggacttcgatcgcgagggcgacatgatcgtgtcagggagctacgacgggctctgccgcgtctgggactcggccaccggtcactgcgtcaaaaccctcatcgacgacgagagcccaccagtgtcctttgccaagttctcccccaatggcaagtttatcctcgcggcaacgcttgacagcaccttgaggctttggaatttctcagctggaaagtttctgaagacatataccggccatgttaacacaaagtactgcatcccagcggcgttttctatcacgaatagcaagtatattgtcagtggctccgaggacaaatgtgtctacctatgggacctccagtcaagaagaatagtgcagaaactggaaggccatactgatactgtcattgcggtctcatgtcatcccaaggaaaacatgatcgcatccggggcgcttgacaatgacaagaccgtgaaagtttgggtccaaaaggaagaagattgaacccagctttcttgtacaaagttggcattataagaaagcattgcttatcaatttgttgcaacgaacaggtcactatcagtcaaaataaaatca

SEQ ID NO: 294 - protein, 319 aa, Zea mays
MAAPAADDDSASPGYVLRSTLEGHRRAVSTVKFSPDGRLLASASADKLLRVWSSSDLTPVAELEGHGEGVSDLSFSPDGRLLASASDDRTVRIWDLAVGGGARLVKTLTGHTNYAFCVSFSPHGNVLASGSFDETVRVWEVRSGKCLRVLPAHSEPVTAVDFDREGDMIVSGSYDGLCRVWDSATGHCVKTLIDDESPPVSFAKFSPNGKFILAATLDSTLRLWNFSAGKFLKTYTGHVNTKYCIPAAFSITNSKYIVSGSEDKCVYLWDLQSRRIVQKLEGHTDTVIAVSCHPKENMIASGALDNDKTVKVWVQKEED

SEQ ID NO: 295 - DNA, 1714 bp, Zea mays
ttttgactgatagtgacctgttcgttgcaacaaattgatgagcaatgcttttttataatgccaactttgtacaaaaaagcaggcttaaacaatggcggcggagcaggggcggtcgctggcggagacgcccacctggtccgtggcaaccgtcaccacgctcatggtcgctgcctgcttcctcgtcgagcgctccctctcgcgcttcgccaagtggctgcgcaagaccaagcggaaggccatgctcgccgcgctcgagaagatccgcgaagagctgatgctgctcggagtcatctcgctgctgctcagccagacggcgcgcttcatatcggagatctgcgtgccgtcctcgctcttcaccagccgcctctacatctgctccgagagcgactaccaggacctgctgcgcaacacggacgccaaccagacggcgctcgacaagaacatgttcggtggccaacggctgcacgtctgtggcgagggccatgaaccttttgtttcgtacgagggccttgagcagctgcaccggtttctcttcatccttggtatcactcatgtgttgtacagttttgtaacagtggttctgtccatgatcaagatctatagctggaggaagtgggaaaccttagcaggtccaattgctgctgaggaattgaaagctaggagaaccaaggtgatgagaaggcagtcaacctttgtttttaacaatgcttctcatccatggagcaaaaataaaatacttatttggatgctttgctttttgcgtcaattcaagggctccataataaggtcagactatttggcactgaggttgggctttgtcacatatcacaagctaccacattcatatgacttccataaatacatggtacggagcatggaagatgattacaatgggactattggtatcagttggccactttgggcatatgcgattgtctgcatattaatcaacgttcatggtatcaatatatatttctggttgtcctttgttcctgttattctggtgcttctagtgggtactgaacttcagcacgtcattgctcagttggctttggaagtcgctgaggcaacagcgccttatgttggctcacaacttaaactgcgtgatgatctattttggtttggaaagcctcgggtactctggtggcttatacagttcatttcatttcagaatgcttttgagctggcaacattcttatggtctctgtgggaactcagtgcgcaaacatgtttcatgaagcactactacatggttgccattcggttgatttctgggctcctagttcagttttggtgcagctacagcacactgccgctgaatgtgattatttctcagatgggttccaagttcaagaaatcactggtctcggagaacgtgggggagtcgctgcacagctggtgcaagagggttaaggacaggagccgacacaatccgctcttctcgcggaacgggaccctcacgaccagatccgtgtgctccctagacaccacctacgagacggatcacgagacgaacacggtgtgcacgctgtcgaggacggcgtcggcgacgtcgctggacgaccagttgaccgtggtcaccgtcgatgacgagccgtcctgcattgagaaggatgtctgaacccagctttcttgtacaaagttggcattataagaaagcattgcttatcaatttgttgcaacgaacaggtcactatcagtcaaaataaaatca

SEQ ID NO: 296 - protein, 509 aa, Zea mays
MAAEQGRSLAETPTWSVATVTTLMVAACFLVERSLSRFAKWLRKTKRKAMLAALEKIREELMLLGVISLLLSQTARFISEICVPSSLFTSRLYICSESDYQDLLRNTDANQTALDKNMFGGQRLHVCGEGHEPFVSYEGLEQLHRFLFILGITHVLYSFVTVVLSMIKIYSWRKWETLAGPIAAEELKARRTKVMRRQSTFVFNNASHPWSKNKILIWMLCFLRQFKGSIIRSDYLALRLGFVTYHKLPHSYDFHKYMVRSMEDDYNGTIGISWPLWAYAIVCILINVHGINIYFWLSFVPVILVLLVGTELQHVIAQLALEVAEATAPYVGSQLKLRDDLFWFGKPRVLWWLIQFISFQNAFELATFLWSLWELSAQTCFMKHYYMVAIRLISGLLVQFWCSYSTLPLNVIISQMGSKFKKSLVSENVGESLHSWCKRVKDRSRHNPLFSRNGTLTTRSVCSLDTTYETDHETNTVCTLSRTASATSLDDQLTVVTVDDEPSCIEKDV

SEQ ID NO: 297 - DNA, 1737 bp, Zea mays
atggcgagcaacggctcgtcgctggtgcgccgagccgccgcagcggtgcgccgcatgcctcgttggaagaagcggcttgtcttcttcgccgtcggagctagcaccttaacttatgcttgtcaagataatcgtgttcttcaaatttgtgatgttactggaaacaagaagaaggtggttatccttggaactggatgggctggtgcaagtttcttgagaaatattgacacatctttgtatgatgtccatgtggtatcacctcgcaattacttcaccttcactcctttgttgccaagtgtgacatgtggcacagtcgaagcacgtagtatcgtggagccaattcgcaatatcgtgagaaagagaaatggtgcattccgattttgggaggcggagtgcttcaagattgatccaacaaacaaaaaagtccactgcagatcagatgttgggacaaacattaatggaaacggtgaatttgtggtggattatgattacctgattgtcagtgttggggctagacctaatactttcaacacgcctggtgttactgagaattgccatttcctaaaggaagtagaggatgctcaaaagatcaggaagagtgtcatgaaatgttttgaaagagctgcccttccaaatctttctgaggaagaacgaaagaagaaccttcattttgttattattggtggtggcccaacaggggtagaatttgctgcagagttgcacgactttgtgaatgaagacttggcaaagttgtatcctgatgttaagaagcacgtaaacatttcagtaattgaagcaggaggtcatatccttacaatgtttgacaaaagaatcacccaatttgctgaagagaagttcaagagggatggcatagatttgaagacaaattttaaagtcgtgaaggtgtctaataaggatattctcatgaccaatcctgctacaggagaggtcgccgttccttatgggatggcagtttggtcaactggaattggaacccgtcccatcattatggattttatgaagcaagttggtcaggagaaccggcgtgtgctagctactgatgagtggcttagggttcaagggtgtgaggatgtatatgctcttggtgattgcgcaacgattgctcaaagaaaagttatggaagatgttgctgccatattccgagtagcagacaaggataactctggcactttaactgtgaagaaaataaaagatgttcttggagacatctatgagagatacccacaagtggaattgtatcttaaatccaaccaaatgaagggcttccatgatctacttaaagactcagatggtagctccaaggagttcaaagaactggacatcgaacagttcaaaagggcccttgctcaagtggactctcaagtcaagatgctcccagcaacagctcaggttgctgcacaagagggaagttacctagcggattgcttcaacagaatgaagatgtgtgaagaatatcctgaggggcctataaggatcagaggtgcagggcgccatcggttcaaacctttcaggtacaagcatcttgggcaattcgctccactgggtggagagcaaactgcttaccaattgccaggtgactgggtacatgttggacacagcacccaatggctgtggtattctgtctatgcaagcaaacaattcagttggcgcacaaggatgctagtcgtatcagattgggggaggcgattcatctttggaagggactccagtagcatataa

SEQ ID NO: 298 - protein, 578 aa, Zea mays
MASNGSSLVRRAAAAVRRMPRWKKRLVFFAVGASTLTYACQDNRVLQICDVTGNKKKVVILGTGWAGASFLRNIDTSLYDVHVVSPRNYFTFTPLLPSVTCGTVEARSIVEPIRNIVRKRNGAFRFWEAECFKIDPTNKKVHCRSDVGTNINGNGEFVVDYDYLIVSVGARPNTFNTPGVTENCHFLKEVEDAQKIRKSVMKCFERAALPNLSEEERKKNLHFVIIGGGPTGVEFAAELHDFVNEDLAKLYPDVKKHVNISVIEAGGHILTMFDKRITQFAEEKFKRDGIDLKTNFKVVKVSNKDILMTNPATGEVAVPYGMAVWSTGIGTRPIIMDFMKQVGQENRRVLATDEWLRVQGCEDVYALGDCATIAQRKVMEDVAAIFRVADKDNSGTLTVKKIKDVLGDIYERYPQVELYLKSNQMKGFHDLLKDSDGSSKEFKELDIEQFKRALAQVDSQVKMLPATAQVAAQEGSYLADCFNRMKMCEEYPEGPIRIRGAGRHRFKPFRYKHLGQFAPLGGEQTAYQLPGDWVHVGHSTQWLWYSVYASKQFSWRTRMLVVSDWGRRFIFGRDSSSI

SEQ ID NO: 299 - DNA, 1166 bp, Zea mays
ttgactgatagtgacctgttcgttgcaacaaattgatgagcaatgcttttttataatgccaactttgtacaaaaaagcaggcttaaacaatggggctcagcctctcgcaggtcggttcccacctcgcatccacactcggtgcggacgctcacggccaccatcaggacctcctccggctcggtggcagcaacgccgcgagccgctttgagcatcttctggggccgtccaacgcctccgcgttccggcccctgccgcctccaccatcgtcggcatttctcatgggcgctccgcaggagtttggcgcaggcgacggcagcgggtcccacgggttcttgcagggcaagccgttccacagtctcatgcatctgccggatctccaaggcaacggcgccgggggtgcctcggcgtcgtcggctacgggtctcttcaaccttggctacatcgcaaacagtgcaaacagctcaggtacttccagccatggccatgcaagccagggacacctgacaagtgatcagttcagcgaaggaggtggcggcggcggctccgagtcatcggccgcgatgctttttagcggcggcgggaacttcgccggtggtgaccaccaagttgctcctggcgggatgtacaacaatgatccggccgtgatgctgccgcagatgtccgcgacggcgcttctgcagaaggcgtcccagatgggctccagcgcgagcgcgcacggcggcgtgtccgtgtttggggggctcgtgggctcgtcggcgccctccgctaggcacgcccgggcacccatgctcgaccagagccagatgcacctacagagcttgatgagctcgctggctgccggcggcatgttcggcggcgccaacagcggcagcatgattgacccgaggatgtatgacatgaaccaagatgtgaagtttagccagggccgtggtggcgctgagatgacgcgcgacttccttggcgtcggcggcgatggtgtcatgagaggcatgacagtggcgagagcggggcaccaagacggtgccgatgacatgaactccttggaagccgagatgaagtcggcctcgtcgcccttcactggagacaggatgcaataaacccagctttcttgtacaaagttggcattataagaaagcattgcttatcaatttgttgcaacgaacagg

SEQ ID NO: 300 - protein, 335 aa, Zea mays
MGLSLSQVGSHLASTLGADAHGHHQDLLRLGGSNAASRFEHLLGPSNASAFRPLPPPPSSAFLMGAPQEFGAGDGSGSHGFLQGKPFHSLMHLPDLQGNGAGGASASSATGLFNLGYIANSANSSGTSSHGHASQGHLTSDQFSEGGGGGGSESSAAMLFSGGGNFAGGDHQVAPGGMYNNDPAVMLPQMSATALLQKASQMGSSASAHGGVSVFGGLVGSSAPSARHARAPMLDQSQMHLQSLMSSLAAGGMFGGANSGSMIDPRMYDMNQDVKFSQGRGGAEMTRDFLGVGGDGVMRGMTVARAGHQDGADDMNSLEAEMKSASSPFTGDRMQ

SEQ ID NO: 301 - DNA, 1524 bp, Zea mays
atggcggcggccgtggcgtcgctgtacaggcgggtcctcccgtcgccgccggcggtggacttcgcttcgccggagggcaagcgcctattcgcggaggccctggcggcgggcaccatggagggtttcttccccctggtctccgtcttccagacgcagtcggagccggccttctgcggcctggcctcccttgccgtcgtgctcaacgcgctcgccatcgacccgggccgccgctggaaggggccctggcggtggttcgacgagtccatgctcgactgctgcgagcccctcgataaggtcaaggccgagggcatcaccttcggcaaggtcgcctgtctcgcgcactgctccggagccgacgtccaatccttccgcaccaaccgggttaccatccacgacctacggcggcatctcatccgatgcgtctcctcgcaggactgccatctgatcgcctcctaccacaggcggcctttcggacagactggaactggtcatttctccccaattggtggctaccatgccggacaggatatggtgctcatcttggatgtcgcccgtttcaaatatcctccgcattgggttccattgcaacttctttgggaagccatgaatacaactgatgactcaactggacttctcagagggttcatgcttatatcaagaaaggttgcagccccttcattgttgtacacagtgagttgcagagatgaaaactggaaacgcatgtcaaaatattgtgttgaagatttaccgagtcttctgaaggcagggaacctagacgatgttccagcgcttctgtcccgtttaattgagtctcttccagctgacgctgaatctttgatcaaatgggttgtcgaagtcaggagaaaagaggagggtggaccaagcttaaacaaagaggagaaagaaaggcttttcttgaaggaaaatgtactaaagcaagttcgtgataccaggctatttaccatagtccatgatttgcagtatgctaataaaccatgttataattgctcatcgtcgagcgaagatgattcccttactaggattgcagccgttgtgtgctgtcagggagctgcaatgctatcaggtaaccttgtgccaagagatgccttctgctgcagagaaacaagctttgaatgtgtccaagcgaatggtgacgggcttaagactgttatctcaggctccgtggtatgtgaaggcagtgaacaaggtgttgatatgcttttaccaatgtcttcacctggtgccagttcatgcaattcaaacttgaagagcaatgccgtcaaatatccatcaagcgtggatgttctaactgttcttctgctggctttacatcccaacacgtggttgggcatcaaagacgagaagctcaaagctgaatttcagactcttatttcaacagacagtctacctgatgatctgaaacgagagatattgcacctaaggcggcaactctactatctaaaggcctgtaaagaagaggaatgcgaagatgccgagcaaccatcgcctaagcagcagtgctga

SEQ ID NO: 302 - protein, 507 aa, Zea mays
MAAAVASLYRRVLPSPPAVDFASPEGKRLFAEALAAGTMEGFFPLVSVFQTQSEPAFCGLASLAVVLNALAIDPGRRWKGPWRWFDESMLDCCEPLDKVKAEGITFGKVACLAHCSGADVQSFRTNRVTIHDLRRHLIRCVSSQDCHLIASYHRRPFGQTGTGHFSPIGGYHAGQDMVLILDVARFKYPPHWVPLQLLWEAMNTTDDSTGLLRGFMLISRKVAAPSLLYTVSCRDENWKRMSKYCVEDLPSLLKAGNLDDVPALLSRLIESLPADAESLIKWVVEVRRKEEGGPSLNKEEKERLFLKENVLKQVRDTRLFTIVHDLQYANKPCYNCSSSSEDDSLTRIAAVVCCQGAAMLSGNLVPRDAFCCRETSFECVQANGDGLKTVISGSVVCEGSEQGVDMLLPMSSPGASSCNSNLKSNAVKYPSSVDVLTVLLLALHPNTWLGIKDEKLKAEFQTLISTDSLPDDLKREILHLRRQLYYLKACKEEECEDAEQPSPKQQC

SEQ ID NO: 303 - DNA, 1344 bp, Zea mays
atgggcgcgcccgcgccgaggccgccgccgccgcgcgcaaccgcccgcgccctgctcgccgtctccgtcgccgtcgccgcgtggctcggcgcctccgcgggctcggacagcggcgccggcgtgctgcggcgggcgcagcgcggggagttcgcgtcgtggatggccggcgtgcggcgggccatccacgagcggcccgagctggcgttccaggagcacgagacgagcgcgctggtccggagggagctcgacgcgatgggcgtcgcgtacaggtacccggtcgccgggacgggcgtcgtcgcggccgtcggcaccggggcgccgccgttcgtcgcgctgcgcgccgacatggacgcgctcccgctgcaggaggaagtggagtgggagcacaagagcaaggaggcccggaagatgcacgcctgcggccacgacgcgcacaccgcaatgctgctcggtgccgccaggatcctccatgagcgccgcaacgacctgcagggcacagtagtcctccttttccagccgggtgaggaggtcggtattggcgcaaagaggatggtggaggcaggcgccgtggagaacgtggaggccatattcgggttccacgtcaccgtgctgctccccaccggcgtggtgggctccaggaccggcccgctgcttgccgggtgcgggttcttcgaggcggtgatcaccggggtcggcggccacgccgcctccccacacaacaccgtagaccccgtcctggcagcctccagcgtcgtgctcagcctgcagagcctcgtgtcgcgcgaggcggacccgctggactcgcaggtggtgacggtgacgaggttcctgggcggcggcgcgttcaacgtggtcccgggctccgtgacgatcggcggcacgttccggtgcttctcggccgagggcttcctgcggctgaagcggcggatcgaggaggtggtcgtggcgcagtccgcggtgcaccggtgcgcggcgtccgtggacttcagcgccggtgggagcccgctgctgcccccgaccgtgaacgccgcgccgctgcacgcgcacttcgaggccgtcgccgccgacacggtcggcgtgggcgccgtccgtggcgccatggagccctgcatgggcagcgaggacttcgcgtccttctcggcggccgtccccgcctcgcacttctacttcgtcggcatagggaacgaggcgatcggggccgtgcacgccgcgcactcgccgcacttcctcgtcgacgatggtgcgctcccgtacggcgccgcgatgcacgccaacctcgccatcgagtacttgcggaaccacgcgatagccaataggtccgttggtccccacgacgagctttag

SEQ ID NO: 304 - protein, 447 aa, Zea mays
MGAPAPRPPPPRATARALLAVSVAVAAWLGASAGSDSGAGVLRRAQRGEFASWMAGVRRAIHERPELAFQEHETSALVRRELDAMGVAYRYPVAGTGVVAAVGTGAPPFVALRADMDALPLQEEVEWEHKSKEARKMHACGHDAHTAMLLGAARILHERRNDLQGTVVLLFQPGEEVGIGAKRMVEAGAVENVEAIFGFHVTVLLPTGVVGSRTGPLLAGCGFFEAVITGVGGHAASPHNTVDPVLAASSVVLSLQSLVSREADPLDSQVVTVTRFLGGGAFNVVPGSVTIGGTFRCFSAEGFLRLKRRIEEVVVAQSAVHRCAASVDFSAGGSPLLPPTVNAAPLHAHFEAVAADTVGVGAVRGAMEPCMGSEDFASFSAAVPASHFYFVGIGNEAIGAVHAAHSPHFLVDDGALPYGAAMHANLAIEYLRNHAIANRSVGPHDEL

SEQ ID NO: 305 - DNA, 643 bp, Zea mays
ttttattttgactgatagtgacctgttcgttgcaacaaattgatgagcaatgcttttttataatgccaactttgtacaaaaaagcaggcttaaacaatgtcaagtggcacttcgtccggatcgagccggtgggtccaaagttctagatccgaggatgacctagatctccaggcccagatggagaggaggagaaagcggaggaaggagtcgaatcgggagtcagctcggaggtctaggcaacggaagcaagaacaccttgacgacctcacctcacaggtaaatcagctgaaggaccagaacaagcagctcagcatggcactgagtataaccagccaaaaccttgtggcagtgcaagcgcagaactctgttctgcagacccagaagatggagctggacagcaggctgggtgccctgacggagatcctctggtacatgaactcaagcaccagcaccagcactgctcctacaaatccagccatagcgaacgacttcacagcatggagcagagcctctgatattcttggtggaaccagctacagcgccatagacctgtaccaatgcttctagacccagctttcttgtacaaagttggcattataagaaagcattgcttatcaatttgttgcaacgaacaggtcactat

SEQ ID NO: 306 - protein, 156 aa, Zea mays
MSSGTSSGSSRWVQSSRSEDDLDLQAQMERRRKRRKESNRESARRSRQRKQEHLDDLTSQVNQLKDQNKQLSMALSITSQNLVAVQAQNSVLQTQKMELDSRLGALTEILWYMNSSTSTSTAPTNPAIANDFTAWSRASDILGGTSYSAIDLYQCF

SEQ ID NO: 307 - DNA, 2835 bp, Zea mays
atggacatggacatggagatgccagatcccgacgagctcgagtggatggagagccacggcctagtccctgaggaagaggacgcctacttcgacgaccccgacgagggcttcgtcctggcccccggcgattcggatcaaccgtgcaattccccgcagccgcaggagtccgccgcgccaagagcaaatgaagcgccgggcggtttgaagcggcctccgccaccgccaccgccggagcaggatgaggaagaggagaggagcaagcggagaaacgttgagcaggaggacgaggattggctgcgctactcgccgcctcccgcccctgagattgtcgtcgccgagaagacaatctcgcggttcgcgtcggagatccatggagactctgtgcccgtaactgctcccaatggtgagagagtttatgccaagcttgcaatggaggggttggtcggtcgaggaattagcggaactaggcaaggggttcagttctccaacccaaacagcaatcacaagggcctgctctcagaatcctttgactcactaacaaggcgtgctgagcaggaggctttagcaaaggcattgcaagaaagtacagactcaatagaccgtgtggcttgttcagcgactccactagtcacagaaaaactttgggtggaaaagtatgcaccgaattctttcacagagctattgagtgatgagcacacaaaccgagaggtacttctatggctaaaacaatgggactccattgtttttggatcccatattcgggctacaggtgatgatgtcttgtctgccttacgtcgacactcttcaaccatccaaaagaatgcaagtaacagaaatttcttttccaagagtaaggggggtcctgttgcaagtcaagatggcacacctctgaatgcacaaagcagcaatccagaaggtttaggtggctccttcagcaaaaagtcatcagttgataatgcaccagaacaaaaggtgttgctattatgcggtccacctgggctcggaaagaccacactcgctcatgttgcagtcagacattgtggctaccatgttgtggagattaatgccagtgacgatcgttccgcttcatccattgaaacaaaaattcttgatgtagttcagatgaactcgatcatgtcggattcaaagcccaagtgtctggtaattgatgaaattgatggagcactcggtgatggaaaaggtgcagtggaggtcatcttgaagatgatcaatgctgaaaagagtaataattccgacaagagcactaatggtgaggaaactcaagcccgaaagacatctaggaaaagtcatagaacagcaaaactactgaggcctgtaatttgtatatgcaatgacatttatgctccagccctgagacaactgcgccaagtagccaaggttcatgtgtttgtgcagccgacaattagccgtgtggtgaacaggctcaagtatatatgcaaaaatgaaggtttcaaggctagttcaatcgcgctttctgcattagcggagtacactgaatgtgacatccgttcatgcctaaacacacttcagtttttgaacaagaaaagagtggccctaaacattacagcgattgattcacaagtaattggacagaaagataagtcaaaaagcatcctcgatgtttggaagcaggttttgcaaaagaaaagactcaagcgggctggaaaggctgaaagccttttcaatgaagacaaggacatagactttcttttcacgctcatatctaaccgtggcgattatgaagttactatggacgggatccatgaaaatttcttgagattatcgtatcatgacccgatgttgcaaaaaactgtaaaatgtctcgatatacttggagtttcagattccttgacccaatatgtttaccggactcagcagatgccacttcatgcatatcaacctccaattgctatcactataagccgcatggttgctcaagttgagaagcctaatattaattggccaaaagctttgcagaggtctcgagcattgcttttagaaaagaaagacatgttgaaaacctggcaaaaccaaatgtcaccatttgtttcaaggcacctctcagtagaatcattcgttgaagacactgcttctccccttttacatattctctctccactgagtttgagacctgtagcactgaatttgctgtcagagagagaaaaggatgaacttgtgcaattagttgatactatggtctcctattcagttacatacagaaacacaaagtttgtccctcaagaaaaggcaaacctatctgtagtgccgcatgaagtttcatcactctctctttatcctccaattaatgatgtcataaattttgagggctatcaatcagagcacattggactgtctttagccatgaaacaggttttggtgcatgaggtggagaagcaaaagatcattaaagatagcgctggcaaattgttgaaccaatctaatgatggaaatatgaagagcgaagctttatcaactataaggaagaaaacagtagctaattccatccgtccagctttacattcttccaaggatagttccaagtgcaattcatctacacttgaaatgcagtcaaactcagcctctattgtgaatgataacgattctatatctgccaaaaaacactccagccgtgcagcaaatttctttgacagatttaggaaggaaagaccagtagacgcaaaaactcatagtgatgtggggctgcaaagagcaacacttcagagggattcacgccctctgatcttcaaatataatgagggtttcacaaatgctgtgaaaagaccagtgagagttagggatcttctgctcagctag

SEQ ID NO: 308 - protein, 944 aa, Zea mays
MDMDMEMPDPDELEWMESHGLVPEEEDAYFDDPDEGFVLAPGDSDQPCNSPQPQESAAPRANEAPGGLKRPPPPPPPEQDEEEERSKRRNVEQEDEDWLRYSPPPAPEIVVAEKTISRFASEIHGDSVPVTAPNGERVYAKLAMEGLVGRGISGTRQGVQFSNPNSNHKGLLSESFDSLTRRAEQEALAKALQESTDSIDRVACSATPLVTEKLWVEKYAPNSFTELLSDEHTNREVLLWLKQWDSIVFGSHIRATGDDVLSALRRHSSTIQKNASNRNFFSKSKGGPVASQDGTPLNAQSSNPEGLGGSFSKKSSVDNAPEQKVLLLCGPPGLGKTTLAHVAVRHCGYHVVEINASDDRSASSIETKILDVVQMNSIMSDSKPKCLVIDEIDGALGDGKGAVEVILKMINAEKSNNSDKSTNGEETQARKTSRKSHRTAKLLRPVICICNDIYAPALRQLRQVAKVHVFVQPTISRVVNRLKYICKNEGFKASSIALSALAEYTECDIRSCLNTLQFLNKKRVALNITAIDSQVIGQKDKSKSILDVWKQVLQKKRLKRAGKAESLFNEDKDIDFLFTLISNRGDYEVTMDGIHENFLRLSYHDPMLQKTVKCLDILGVSDSLTQYVYRTQQMPLHAYQPPIAITISRMVAQVEKPNINWPKALQRSRALLLEKKDMLKTWQNQMSPFVSRHLSVESFVEDTASPLLHILSPLSLRPVALNLLSEREKDELVQLVDTMVSYSVTYRNTKFVPQEKANLSVVPHEVSSLSLYPPINDVINFEGYQSEHIGLSLAMKQVLVHEVEKQKIIKDSAGKLLNQSNDGNMKSEALSTIRKKTVANSIRPALHSSKDSSKCNSSTLEMQSNSASIVNDNDSISAKKHSSRAANFFDRFRKERPVDAKTHSDVGLQRATLQRDSRPLIFKYNEGFTNAVKRPVRVRDLLLS

SEQ ID NO: 309 - DNA, 1723 bp, Zea mays
tgattttattttgactgatagtgacctgttcgttgcaacaaattgatgagcaatgcttttttataatgccaactttgtacaaaaaagcaggcttaaacaatgatcgcaaacggcctccgcaaatccagtgctgcctcctcccaggttagcaagctggtgaaatacattgctagtgctggaagcttgcaaggggggcacagtttatcagagccgtctgccagacattacagctctgaaccttcacttcaggcgacagaagaaaatgggtttaaggggcacagcatgctggctccattcacagcgggatggcagagcactgatgtacacccattggttatagagagatcagagggttcttatgtctatgacagcaatgggaagaagtgtattgatgctcttgcaggactgtggtgcacagctttaggtggtaatgagcctcgactagtcaaagcggcaactgagcaattaaacaaattaccgttctaccattccttttggaaccgtacaaccaaaccctcattggatctcgcaaatgatattctcagcatgttcaccgcaagggagatgggaaaggtgttcttcacaaatagtggttcagaagcaaatgactcccaggttaaactagtgtggtattataataatgcactgggaaggccagacaagaagaaatttattgctcgctcaaaatcgtaccatggatcaaccttgattgcagctagtctatcaggtctgccagcgcttcatcagaagtttgatctaccagcaccttttgtcctgcacacagactgccctcactactggcgattccgtcttcctgatgagacagaagaagagttttcaactagacttgccaataatttggagaatcttgtcctcaaagaaggacctgaaacaattgctgctttcattgctgaacctgtgatgggcgctggtggtgttatccttcctccaaagacctattttgagaagattcaggcagttctgaagaagtatgacatcttgttaattgcggatgaggtcattactgcatttggaagactagggacaatgtttggatgtgatatgtataatattaaaccagatcttgtttccatagccaaggctctttcttctgcatatatgccaattggagcaattctcgttagcccagaaataacggatgtaatctattctcagagcaataaacttggttcttttgctcatggctttacatactcgggacatcctgtttcttgtgccgttgctgtagaaaccttgaagatatataaggaaaggaatattgtagaacacgtcaacaaaattgctccaaggttccaggagggaatcaaggccttctcaggcagcccaattgttggggagatacgcggtctgggactgatacttggaactgaatttgtcgacaacaaatctccaaatgatccatttccagctgaatggggtgttggttcgatatttggcgcggagtgcgagaagcgtgggatgctcatcagggtggctggggacagcatcatgctgtcacccccgctgatcatgactcccaatgaagtcgaagaaatcataagcaaattcggcgatgctctgaaggctacagaggaacggattgtagaactgaaatccaggaagaattagacccagctttcttgtacaaagttggcattataagaaagcattgcttatcaatttgttgcaacgaacaggtcactatcagtcaaaataaaatcat

SEQ ID NO: 310 - protein, 509 aa, Zea mays
MIANGLRKSSAASSQVSKLVKYIASAGSLQGGHSLSEPSARHYSSEPSLQATEENGFKGHSMLAPFTAGWQSTDVHPLVIERSEGSYVYDSNGKKCIDALAGLWCTALGGNEPRLVKAATEQLNKLPFYHSFWNRTTKPSLDLANDILSMFTAREMGKVFFTNSGSEANDSQVKLVWYYNNALGRPDKKKFIARSKSYHGSTLIAASLSGLPALHQKFDLPAPFVLHTDCPHYWRFRLPDETEEEFSTRLANNLENLVLKEGPETIAAFIAEPVMGAGGVILPPKTYFEKIQAVLKKYDILLIADEVITAFGRLGTMFGCDMYNIKPDLVSIAKALSSAYMPIGAILVSPEITDVIYSQSNKLGSFAHGFTYSGHPVSCAVAVETLKIYKERNIVEHVNKIAPRFQEGIKAFSGSPIVGEIRGLGLILGTEFVDNKSPNDPFPAEWGVGSIFGAECEKRGMLIRVAGDSIMLSPPLIMTPNEVEEIISKFGDALKATEERIVELKSRKN

SEQ ID NO: 311 - DNA, 1251 bp, Zea mays
atggtggatgtggaggagaccgggaacaagttgcaatcgcagatgcgcctccacgcggagccggaggacgacgccgccgacctccccctcccggccctcttcgatagggcgtcgcggctccacgccctggcctccagctccgctctcgaccaggatgggatccgcacgggggttgacctgctgcggcgctgcgacgacatggtcagcaagctcggcctcttctcccccaacgagaccaaggaggacgtctccacagcaaacctcaagtacctactggtcccatattaccttgcagaaatgaccgaaaagatagcacaggaggatcggatcccggttcttaagacgtcacaggaccatctgaaggagttcattgctctatgtgaagtactagagcttatcccagaggatgagctagaattgtctaggcagaagcagccagatactatgacaaacagaagagcgcagaaggttgcccggttcaaacgtcaaaaggctgcagaaacgaagctccaagagatcagagagagaaaagaaaggcgtggacgctcattgagagcagctgctttgtctgccccaattgaagctggagaggaagatgacctggagaatgatggggaggaagaaagagaggcttggttagctaccatctcattggctctctgcaaggcatttgatcttctcgacatgctaaagaaggaagaagaaatgcttcaagctgtaaaggaaaggaaggcaaaggatgggaatgcatttgctcgtgaaatgctcgatgaacgaacgaagaaggccgaaacatggcaccataatgctgccaaccgtgtggcatattccaaaccagctgatcctatcacttgtgcaacatttgctcaagatgtcattgaaggtagagcaagcgtttcacaagctcacgagcacaaacaccagcccctgatatttggacctgcaagtattgttggtggtggtctaaccagtgaaagggaaagaatgacagcgcaagtttttcagcctagctacaggatgccaacaatgagcattgaagaagctggtttgcgcgagatgaaaatgatggagaaatggcaagaaaggaccgctgagctgatgaaagaatcaacctccgcgtggcacaaggatggcagcagctcggcccaagaggatgaggacgccgaggaggaaaaagcaagagcgtgggacgactggaaggatgacaaccctcgtggcgcaggcaacaagaagctcacgccctgtggttaa

SEQ ID NO: 312 - protein, 416 aa, Zea mays
MVDVEETGNKLQSQMRLHAEPEDDAADLPLPALFDRASRLHALASSSALDQDGIRTGVDLLRRCDDMVSKLGLFSPNETKEDVSTANLKYLLVPYYLAEMTEKIAQEDRIPVLKTSQDHLKEFIALCEVLELIPEDELELSRQKQPDTMTNRRAQKVARFKRQKAAETKLQEIRERKERRGRSLRAAALSAPIEAGEEDDLENDGEEEREAWLATISLALCKAFDLLDMLKKEEEMLQAVKERKAKDGNAFAREMLDERTKKAETWHHNAANRVAYSKPADPITCATFAQDVIEGRASVSQAHEHKHQPLIFGPASIVGGGLTSERERMTAQVFQPSYRMPTMSIEEAGLREMKMMEKWQERTAELMKESTSAWHKDGSSSAQEDEDAEEEKARAWDDWKDDNPRGAGNKKLTPCG

SEQ ID NO: 313 - DNA, 1539 bp, Zea mays
atggcggacacagtgcagtaccgcctggagcggatgaccgacgaactggacgacctggagcgccggggcctcttcacgcgcggcgagctagctgacgtcgtccgcaaacgccgcgacttcgagtaccgcctccgccgccactccccgctccgccaggactttctcgactacatcgcctacgagctccgcctcgactccctccgcaacctccgcaagcgcgccatcatacgcgccgccgccgaagacgacgacgacgagcctcagcacgacgctcgcagcagcgacgacgagggaggccggaggaagaggaagaaggataaatccaagaagaagtggaagaagtccgtctccgacgtcgcgggcgtcctccgcgtcctcgacatctaccggatggccaccgtcaggttcaagggcgatctcgacctctggttccggtacctcgagttctgccgcgacaagcgacacggcaggatgaagcaggttctggcacaagccattcgcttccatcccaaggttcctgggctttggatctatgcagcagcatgggaattcgatcagaacctgaacgttgccgcggcacgtgcactgatgcagagcggtctcaggtcttgccctcagtcagaggatatgtggatcgagtatcttcgcatggagcttacctaccttaacaagctcaaggctcgaaaggttgctcttggagaggatgtcaagacgctgcaaaagaaagacaacgatgcgagccagtggaaagaggaaaacaaggaactgttcatgccactgaatgaacaggtcaaagatcctaaggagccaggctcggctggagatgccctggaggagaaggaagacctgttttggcgtcaagggttgttaatcattcagaccatatatcatggtgccgtggaagctcttccgtcaagcttaaccttgcggaagaaattcttggagatactaaacagtgttgacttggcacattctgatgagttaaaactggaggtcctggatgaccttaagagagatttctctcatagcgaggactactgggattggtttgctaggcttcagcttagcaacttgaacagttccagtaattcgaatagaaaggatgctatatcaaacaagttgaacagatcaattcaggtgtatgacgaagctatcaggaagctaccaaattccaaaatgtactcattgtatgcaaagttttggatggatgttatatatactgacagagaagattcagtcacattattccaggattctgaatttgatgcttcagagttcacttcatccatactgaaagtttatgaaaatgcagaatcatgtggatgtcttactgaggatcttgcttgccaatacatatcactttacttgaaactagaaagactggaggaagctaagactctcgcagaaaagctttgtgatggtcctctttcaaatgctgcaaattttgtggagcctgagatttactatggagataaattcaattgcaactgctcctggcagttcttccttgagcaaggagaacctgagctctctgcttga

SEQ ID NO: 314 - protein, 512 aa, Zea mays
MADTVQYRLERMTDELDDLERRGLFTRGELADVVRKRRDFEYRLRRHSPLRQDFLDYIAYELRLDSLRNLRKRAIIRAAAEDDDDEPQHDARSSDDEGGRRKRKKDKSKKKWKKSVSDVAGVLRVLDIYRMATVRFKGDLDLWFRYLEFCRDKRHGRMKQVLAQAIRFHPKVPGLWIYAAAWEFDQNLNVAAARALMQSGLRSCPQSEDMWIEYLRMELTYLNKLKARKVALGEDVKTLQKKDNDASQWKEENKELFMPLNEQVKDPKEPGSAGDALEEKEDLFWRQGLLIIQTIYHGAVEALPSSLTLRKKFLEILNSVDLAHSDELKLEVLDDLKRDFSHSEDYWDWFARLQLSNLNSSSNSNRKDAISNKLNRSIQVYDEAIRKLPNSKMYSLYAKFWMDVIYTDREDSVTLFQDSEFDASEFTSSILKVYENAESCGCLTEDLACQYISLYLKLERLEEAKTLAEKLCDGPLSNAANFVEPEIYYGDKFNCNCSWQFFLEQGEPELSA

SEQ ID NO: 315 - DNA, 801 bp, Zea mays
aacaaattgatgagcaatgcttttttataatgccaactttgtacaaaaaagcaggcttaaacaatggcgacagagcaagcggcggagaactacacggtggaggacctcgtggccctgaacccctacaaccccgacatcctcaacgacctcgagaagttcgtcaatgagcaggtctcatctcagacatgtaacttggatgcaaatctcagccttcttcgcttgtaccagtttgagccagaaaggatgagcatacagattgtggcccacatactgattaaggctctcatggcaatgccagcccctgacttcagtttgtgcttattcttaatccctgaacatgtgcaaatggaggagcaattcaaggtattgatagttctttctcactacctagagactgctaggttcagtcaattttgggatgaagcagcaaagaaccgccacatatcggaagcagtgccaggtttcgaacaagcaatccaatcctatgcgattcatgtactttccttgacataccagaaagttccaaggcctattcttgtagaggcaatcaacatcgaaggtctcgcgttggacaagtttcttgagtaccatgccgcgaactcaggttgggtgattgagaagggtgggcagtctcaagtgattgttcttccgcgtaatgagttcaatcacccagagctcaagaagaacacagccgatatccttccgtttgaacacgtaacacgcatattccctgtccttggctgaacccagctttcttgtacaaagttggcattataagaaagcattgcttatcaatttgtt

SEQ ID NO: 316 - protein, 226 aa, Zea mays
MATEQAAENYTVEDLVALNPYNPDILNDLEKFVNEQVSSQTCNLDANLSLLRLYQFEPERMSIQIVAHILIKALMAMPAPDFSLCLFLIPEHVQMEEQFKVLIVLSHYLETARFSQFWDEAAKNRHISEAVPGFEQAIQSYAIHVLSLTYQKVPRPILVEAINIEGLALDKFLEYHAANSGWVIEKGGQSQVIVLPRNEFNHPELKKNTADILPFEHVTRIFPVLG

SEQ ID NO: 317 - DNA, 643 bp, Zea mays
ttttttataatgccaactttgtacaaaaaagcaggcttaaacaatgagggctgtggtgcagcgcgtcctctcggccagtgtcgaggtcgaggggcgaatagtgtctgcgatcggccctggactcctcgttctcgtcggcgtccacgaggcggacacggactccgacgccgactacatttgtcggaaggtcctgaacatgaggctgttttcaaatgacaagactggaaaagcatgggatcaaagtgttatgcagcgtaactttgaagtgctattggtcagtcagttcaccttatacggcatcctgaagggtaataagccagattttcacgtggctatgtcacctgcaaaagcgaaaccattctatgcttctctagttgagaaatttcaaaggtcatactcggctgattcagtgaaagatggtgtttttggagcgatgatgaaggtttctttggtgaatgatggccccgtgacaatgcaaatcgactcaccctcactgcaaggtgctgctcagtcaagcaatggttatgatgatttggttgcggatggtgaagcaagagtagctaaagagacgtgttaaacccagctttcttgtacaaagttggcattataagaaagcattgcttatcaatttgttgcaacgaac

SEQ ID NO: 318 - protein, 177 aa, Zea mays
MRAVVQRVLSASVEVEGRIVSAIGPGLLVLVGVHEADTDSDADYICRKVLNMRLFSNDKTGKAWDQSVMQRNFEVLLVSQFTLYGILKGNKPDFHVAMSPAKAKPFYASLVEKFQRSYSADSVKDGVFGAMMKVSLVNDGPVTMQIDSPSLQGAAQSSNGYDDLVADGEARVAKETC

SEQ ID NO: 319 - DNA, 401 bp, Zea mays
ttttgacggatagtgacctgttcgttgcaacaaattgatgagcaatgcttttttataatgccaactttgtacaaaaaagcaggcttaaacaatgccgtcgcacaagaccttccggatcaagaagaagctggcgaagaagatgcgccagaaccgccccatcccctactggatccgcatgcgcactgacaataccatcaggtacaacgccaagcgcaggcactggcgccgcaccaagctcggcttctgaacccagctttcttgtacaaagttggcattataagaaagcattgcttatcaatttgttgcaacgaacaggtcactatcagtcaaaataaaatcattatttgccatccagctgatatcccctatagtgagtcgtattacatggtcatatctgtttc

SEQ ID NO: 320 - protein, 96 aa, Zea mays
MLFYNANFVQKSRLKQCRRTRPSGSRRSWRRRCARTAPSPTGSACALTIPSGTTPSAGTGAAPSSASEPSFLVQSWHYKKALLINLLQRTGHYQSK

SEQ ID NO: 321 - DNA, 1122 bp, Zea mays
attgatgagcaatgcttttttataatgccaactttgtacaaaaaagcaggcttaaacaatgatgggcgggttcctctccagggtcctcctgttggcttttggctatgcctatcctgcctacgaatgctacaagactgttgaactgaacaaaccagagattgcgcagctcatattttggtgtcagtattggattttagttgccctgttgacagttttggagagattcggagatttcacaatatcatggctaccgttctactcggaagcaaagctgatgttctttgtatacttgtggtaccctaagacaaagggaactacgtatgtttatggaactttctttaaaccatatatttctcagcatgagaatgaaatcgaccggaatctccttgagctgagagctcgagccaccgacacggttgtactttattttcagaaggctgcttcggcaggacaaagtactttctttgacgttttaaaatatgttgctgcccagtcaccttctcagaaatcaaggcaacgccttcatcaggattcacagcagccgccacaacaacaacaaccacaagtgcaggtgcagcaggcgcaaccacaaaaacaagcagcacctgttatgcgcagagcatcatctattactgctcggcaagcagcaatggcacagcaatctcaggagactaaacccgtttcatcttcgcccaagatcaagcgtcaaacatcagcgagatctggttcagtggcatccacaaagcctccggtagctgcatccgcgctaaaacctggtggtagcccaaagaaaggcgaggtcaaacctgctgccgacccagttcaaactccaaccacaggtgccgattcaccgaaacccgagcctagcgccccatcactccctggagccgaaggggtggacaagatggccatcgacgaggccagtggtgacgccccagagggcgcagaagagcttgaccctgcgctcgaagaggagacgccgatggaggagacgatccgtgtgacgcgcgccaagctaaggaggcgcacggccaccgaagatcctgctgggaattagacccagctttcttgtacaaagttggcattataagaaagcattgcttatcaatttgttgcaacgaa

SEQ ID NO: 322 - protein, 332 aa, Zea mays
MMGGFLSRVLLLAFGYAYPAYECYKTVELNKPEIAQLIFWCQYWILVALLTVLERFGDFTISWLPFYSEAKLMFFVYLWYPKTKGTTYVYGTFFKPYISQHENEIDRNLLELRARATDTVVLYFQKAASAGQSTFFDVLKYVAAQSPSQKSRQRLHQDSQQPPQQQQPQVQVQQAQPQKQAAPVMRRASSITARQAAMAQQSQETKPVSSSPKIKRQTSARSGSVASTKPPVAASALKPGGSPKKGEVKPAADPVQTPTTGADSPKPEPSAPSLPGAEGVDKMAIDEASGDAPEGAEELDPALEEETPMEETIRVTRAKLRRRTATEDPAGN

SEQ ID NO: 323 - DNA, 1838 bp, Zea mays
ggccccaaataatgattttattttgactgatagtgacctgttcgttgcaacaaattgatgagcaatgcttttttataatgccaactttgtacaaaaaagcaggcttaaacaatggcgccggagaagccccggaaggaacaggaggaggagttgatgctggaggatggaggcatcgaggagagcccgcgccgcagcttcgaggactgcggcgactccgaggaggaccgcggggagggcgatgacgaggaggagcgggacagcgaccgcgacggcgtcggttcgacgcgctccttcctgccccaaaagtggccgcagagctacagggaaacaactgacacctacacaatcgctgcatcaccgagctttggttacttaggttcttctacaagcaaatactcgctcctcgaccttggtcgcagtattctgggctctgacctgaagtcacctctaatatcggccaaggctgattctgtcagaaacttgccgaaaacccttggttcaatgagagatgggagagtctcgtttcaattgcaacacacgggagaaatctacattagtcaagggtgcaatgtgacgcaaacagtcttcaacgggattaatgtgcttgctggtgttggccttctttccactccgtttacaattcatgaagctggatggactggccttgcagttctagcatgctttgcgattgtttgctgttatactggaattcttctaaaacattgttttgagagcaaagatggtatctcaagttatccagacattggagaggctgcatttggaagaattggccgtgtgttgatatctattattttgtataccgagctatattcatactgtgtggaattcatcattttggagggtgataacctcacatcaatttttcctaaagctggttttgattggcttgggattcatgttgatggaaaacattttttcggagtgttaactgctattttagtcttgccaacagtatggctgcgagatcttcgagtactctcgtacctttcagcgggtggtgtgattgcaactcttctcgtattcctgtccgttggtttagtcggtgttaccgatggtataggcttccattcaactgggaaggcagtaaactggagtggcatgccttttgccattggtatttatggattttgctactccgggcattcggtatttccaaatatctaccagtcaatgtccgatagatctaagttccctaaggcactgttcatatgtttcgcaatttgcacagcaatatatggctcttttgctgtcattggctttctcatgtttggaaagaacactttatcacaaatcactttaaaccttccaaagcattcgtttgcctcagaagttgcactatggaccacggtgatcaaccctttcaccaaatttgccttgttgttaaacccattagctcggagtttagaagagttgcgtcctgaaggttttatgaacgaaacatcatgcgctattatactgaggactgcccttcttgcatcaactgtatgcattgcctttcttctgccgttctttggtcttgtgatgtctctcattggatctcttcttagtatacttgtggcagtcataatgccacccttgtgtttcctgaagatcgcgcagaacaaagcaacttgtgcacaggtaatcgcaagcatttgtatcgtaatgttgggcgtcatcagtgctgccctggggacatactcctccgtgaaaaagattgtagaaaactactaaacccagctttcttgtacaaagttggcattataagaaagcattgcttatcaatttgttgcaacgaacaggtcactatcagtcaaaataaaatcattatttgccat

SEQ ID NO: 324 - protein, 540 aa, Zea mays
MAPEKPRKEQEEELMLEDGGIEESPRRSFEDCGDSEEDRGEGDDEEERDSDRDGVGSTRSFLPQKWPQSYRETTDTYTIAASPSFGYLGSSTSKYSLLDLGRSILGSDLKSPLISAKADSVRNLPKTLGSMRDGRVSFQLQHTGEIYISQGCNVTQTVFNGINVLAGVGLLSTPFTIHEAGWTGLAVLACFAIVCCYTGILLKHCFESKDGISSYPDIGEAAFGRIGRVLISIILYTELYSYCVEFIILEGDNLTSIFPKAGFDWLGIHVDGKHFFGVLTAILVLPTVWLRDLRVLSYLSAGGVIATLLVFLSVGLVGVTDGIGFHSTGKAVNWSGMPFAIGIYGFCYSGHSVFPNIYQSMSDRSKFPKALFICFAICTAIYGSFAVIGFLMFGKNTLSQITLNLPKHSFASEVALWTTVINPFTKFALLLNPLARSLEELRPEGFMNETSCAIILRTALLASTVCIAFLLPFFGLVMSLIGSLLSILVAVIMPPLCFLKIAQNKATCAQVIASICIVMLGVISAALGTYSSVKKIVENY

SEQ ID NO: 325 - DNA, 2891 bp, Zea mays
caaataatgattttattttgactgatagtgacctgttcgttgcaacaaattgatgagcaatgcttttttataatgccaactttgtacaaaaaagcaggcttaaacaatgagaaggttctttttcttcgggtcccctgctgcaaacgctggtgagggagccgggcaaccggtcaatgatagcaggactggacatagaaagacagatgagggaaaggacatctccaccgcgagattgtcgagatccagaagccgtcgtcagaagcggaataaggaggaaccggctaaccccaaacaactcaggaggtccatgtccttctcatccccggccagaagcagctgtgtggaggaacgatgctttagcttctcgggtgatgttccgtgctctttgtacgatgaatctgatgcaccccaccatgccaaagatgtcgctcccgacatgtggtctccagaagggaatccgttctctagagaatatgcaataagaaccccgaaagatcattctgccatggaaaatgattctcctcgttcaaaatactgttcttgctcagcagggcactctcctgttagctctcctgtcgctatacagtgcagatcaacaagactaggcaatttattaaacaggaacgaagtactagatcgttacattgatagagggcatggagatgcaatcgtagatgagaaacagaagcagtgcgtacctacggtttctaatttgggaaggccacctcgaccccactctacagtaccatccataccgagaccattcaaagagacaacggaaagctacccagatgtggacttaaacgacgccttcctttggcgacttgctcaagagggtataggagatacccacaagattacaactatgtgcagtgcatctagacgccacataaacatgtcagatgcttctgaaagagaaagtgcaacaactgttgaagatatttatgaagatttgcaagatgtgagacttccaaatgttatctgcccctccacttgtcctaactcagcggtagaagaaactgatgacatgttgcttcaaagagttaaggaagttgagtcaaggtttactattccttgtggagatgaatatgaatttagcatgctcaggtataaatcatcaacctcaaatgacatgtttcagttgatccagcaattgactgaagataggaaacagttagcatatgaattgtcttcagagatcaaagcacgtgttacagaaagatttgctgccaaagagcaatacaaacaattaaagaaagaattggacaacagaactagaaggctggagaaggagaagagtgaagtacaaactacactggaaggagagatggatagaaggtcagatgattggtctatcaggctatcaagatttcaatctgaagaagagagactacatgaacgggtgagagaacttgcagagcagaatgtgtcatttcagagagaagttacttctcttggagcaactaaggctgaagctttaatgaaagctgcgagtttggaaacgcaaaatagcaaactaaatgacgatctagagaaactaaaaaatgagcatgagaaactgcattattcctcaacagatttgcaggctcgctttgctgagattgtagaggaaagggaccacatccgagaatatttgaaggccaaggagggagagaacaaagcattgcacaaagtaattgcaagactacaaacaacatgtaatgagcaggaaagaacaatcacaggcatgagacaaggatgcatagacgaattaggtaggaaatttgttgagtacagcaccaatgataaaacgagaaaattacaaatggaacttattagactgactggggtggagcaaaagttgagaggtgaaattcgatcttgtaatcttgaagtaaaatctctcagacaagagaacattgcactcttaaatcgtttacaaggtgctggaaatggagcaagcttctcctcgattcgacttgatcaggagcttcaagctagggtggacaacctgcaaatgcaaggcttgtcactacttgataagattagccaactttgtaccaaattgctggatctgatgaaacataagagacatgaaaatgaatatttgtgtggcaatgatgtgtcaacattcagtgattacatatttgagtaccagagcatcaaaggaggaattgaaggtctgaagctaagtttgaaagcaataaattctatactagctgaaaagcaaaatgctaaagaaaaatctggtgaaattgtagctgaaggtagtccttccaaagatcaaacggatgattttggactcaagctgaaagaagaggctatgctgaatagagtactgaaggaggcagtcttgtcaaaagaagttgccattgaacaattgcaatctgatctggcatcttcacttcgcatccaagacgttatgagaaacgagatccagagggttcaggatgagctttcttgcataacccacaaagctaagcagttggagcttcaggtatccaagaaggatgagtcaatcgatgagatccaacaggatttccaggaatctgcaaaggagctggctgctcttcgtggaacactgaaaacagtgacggaggagagggacctgtcgtggcaggaggcgaagcagctgagacgaaacatcagcatcatgcaggacgaggttgtatcgctgaagaagaagatcgaagccctggacgaagacatacttgtgaaggaggggcagatcacaatattgcaggacagcatcgacaagccgttcgacatcatctgcagcccaagatcgatgagggagttcgatatggcgtgaacccagctttcttgtacaaagttggcattataagaaagcattgcttatcaatttgttgcaacgaacaggtcactatcagtcaaaataaaatcattatttg

SEQ ID NO: 326 - protein, 894 aa, Zea mays
MRRFFFFGSPAANAGEGAGQPVNDSRTGHRKTDEGKDISTARLSRSRSRRQKRNKEEPANPKQLRRSMSFSSPARSSCVEERCFSFSGDVPCSLYDESDAPHHAKDVAPDMWSPEGNPFSREYAIRTPKDHSAMENDSPRSKYCSCSAGHSPVSSPVAIQCRSTRLGNLLNRNEVLDRYIDRGHGDAIVDEKQKQCVPTVSNLGRPPRPHSTVPSIPRPFKETTESYPDVDLNDAFLWRLAQEGIGDTHKITTMCSASRRHINMSDASERESATTVEDIYEDLQDVRLPNVICPSTCPNSAVEETDDMLLQRVKEVESRFTIPCGDEYEFSMLRYKSSTSNDMFQLIQQLTEDRKQLAYELSSEIKARVTERFAAKEQYKQLKKELDNRTRRLEKEKSEVQTTLEGEMDRRSDDWSIRLSRFQSEEERLHERVRELAEQNVSFQREVTSLGATKAEALMKAASLETQNSKLNDDLEKLKNEHEKLHYSSTDLQARFAEIVEERDHIREYLKAKEGENKALHKVIARLQTTCNEQERTITGMRQGCIDELGRKFVEYSTNDKTRKLQMELIRLTGVEQKLRGEIRSCNLEVKSLRQENIALLNRLQGAGNGASFSSIRLDQELQARVDNLQMQGLSLLDKISQLCTKLLDLMKHKRHENEYLCGNDVSTFSDYIFEYQSIKGGIEGLKLSLKAINSILAEKQNAKEKSGEIVAEGSPSKDQTDDFGLKLKEEAMLNRVLKEAVLSKEVAIEQLQSDLASSLRIQDVMRNEIQRVQDELSCITHKAKQLELQVSKKDESIDEIQQDFQESAKELAALRGTLKTVTEERDLSWQEAKQLRRNISIMQDEVVSLKKKIEALDEDILVKEGQITILQDSIDKPFDIICSPRSMREFDMA

SEQ ID NO: 327 - DNA, 981 bp, Zea mays
atggaagctgatccgccgttgccgccagcgagcgcactgatggaggagctcgtggaggaggtcctgctgcgcttcccacctgcggacccggcaagcctcgtccgggccgcgctcgtctgcagacgctggcgccgcatcgtcacgggcccgcggttccgccgccgctaccgcgacctccacctccaccgcgggcgcgggggttcgcatcccccgatgctgggcttcctcgccaacgccggcgcggggacccgcttcgtgcccacctccaccttccgcctcgcacccgcgcgcgcgcgcgcgcccgcggacggcctcctcctcggcggctggcgcgcgctcgacgcccgccacggccgcgccctcctgcgccgggacaccggccgcgacgcgcccgtcgactgcgagctcgccgtctgggaccccgccacgggccgccgcacggacctgccccgcctcccctggtcgccctacccctacagctggaacgccgccgtgctctgcgccgccacaatcaccgcctccgcctgtgaccacctcgattgctgcggcggcggcggccacttcctcgtcgtcgtggtgggcaccaaccacgcggagatgttctcccatgtctactcgtcggaggcgggcgcgtggaacgcgtccgcgtccgcgtccgctcggcaccccgacgacaacgtcgacttcgcgcccagcgcgctcgctgggaacgcgctctacttcgcgttccagacgggcgcggcggccctggagtacgatttgggcacgcgggagatggcggtggtgcgcctgccgccgccgccacgcttggactggcagcgagctgtgctcgccacaagggacgatggtcgtctgggactcgccacggcaggcaagtccacgatctacctgtgggcgagggaggcgccgcctcgaggagatgggagttgggtacagactaactatctactggctaactacaaaggaaacgaatggaaataa

SEQ ID NO: 328 - protein, 326 aa, Zea mays
MEADPPLPPASALMEELVEEVLLRFPPADPASLVRAALVCRRWRRIVTGPRFRRRYRDLHLHRGRGGSHPPMLGFLANAGAGTRFVPTSTFRLAPARARAPADGLLLGGWRALDARHGRALLRRDTGRDAPVDCELAVWDPATGRRTDLPRLPWSPYPYSWNAAVLCAATITASACDHLDCCGGGGHFLVVVVGTNHAEMFSHVYSSEAGAWNASASASARHPDDNVDFAPSALAGNALYFAFQTGAAALEYDLGTREMAVVRLPPPPRLDWQRAVLATRDDGRLGLATAGKSTIYLWAREAPPRGDGSWVQTNYLLANYKGNEWK

SEQ ID NO: 329 - DNA, 1200 bp, Zea mays
gccccaaataatgattttattttgactgatagtgacctgttcgttgcaacaaattgatgagcaatgcttttttataatgccaactttgtacaaaaaagcaggcttaaacaatgatgggcgggttcctctccagggtcctcctgctggcttttggctatgcctatcctgcctatgaatgctacaagaccgttgaactgaacaaaccacagattgagcagctcatattttggtgtcagtattggattttagttgccctgttgacagttttggagagatttggagattttacaatatcatggctaccgttttactcagaagcaaaggtgttgttctttgtatatttgtggtaccctaagacaaagggaactacgtatgtttatggaactttctttaagccatatatttctcagcatgagaatgaaatcgaccgaaatcttcttgagctcagagctcgagccaccgatatggttgtcctttacttccataaggctgcttcggtagggcaaaatactttctttgacgttttaaaatatgttgctgcccagtccccttctcggaaatcaaggctgcaccctcatcaggaaccacagcagcagcaaccacaagtgcaggtggagctgcagcagccgcaaccacaaaaacaagcagcacctgttatgcgcagaggagcatctattgctgctcggcaagcagcaatggcacagcaatctctggagactatacccgttccatcttcacccaagatcaagcgtcaaacatcagggagacctggttcggtggcatccacaaagcctgcagcagctgcatccacaccaaaacctggcggtagcccaaagaaaggtgaggtcaaacctgctgtcgacccagttcaaactccagccacaagtgcagattcaccaaaatccgagcctagtgccccaccactttctgagaccgaagaagtagacaacatggcaatcgatgaggtcagtggtgatgctgcagagggcgcggaagagcttgaccctgcgctcgaggagacgccgatggaggagacgatccgtgtgacgcgcgccaagctaaggaggcgcaccgccaccgaggattctgctgggaattagacccagctttcttgtacaaagttggcattataagaaagcattgcttatcaatttgttgcaacgaacaggtcactatcagtcaaaataaaatcattatttg

SEQ ID NO: 330 - protein, 329 aa, Zea mays
MMGGFLSRVLLLAFGYAYPAYECYKTVELNKPQIEQLIFWCQYWILVALLTVLERFGDFTISWLPFYSEAKVLFFVYLWYPKTKGTTYVYGTFFKPYISQHENEIDRNLLELRARATDMVVLYFHKAASVGQNTFFDVLKYVAAQSPSRKSRLHPHQEPQQQQPQVQVELQQPQPQKQAAPVMRRGASIAARQAAMAQQSLETIPVPSSPKIKRQTSGRPGSVASTKPAAAASTPKPGGSPKKGEVKPAVDPVQTPATSADSPKSEPSAPPLSETEEVDNMAIDEVSGDAAEGAEELDPALEETPMEETIRVTRAKLRRRTATEDSAGN

SEQ ID NO: 331 - DNA, 654 bp, Zea mays
gattttattttgactgatagtgacctgttcgttgcaacaaattgatgagcaatgcttttttataatgccaactttgtacaaaaaagcaggcttaaacaatggcgtccaaggttgagctggtggtggaggtcaagtccccggctgacaagctgtgggcggcgctgcgtgactcgacggagctgttccccaagatcttccccgagcagtacaagagcatcgagaccgtcgagggcgacggcaagtcggccggcaccgtccgcctcctcaagtacaccgaggcggtgccgatgctgacgttcgccaaggagaagcttgagacggcggacgacgagaacaaggtggtgtcgtacagcgtggtggacggcgagctggcggacttctacaagaacttcaagatcacgctgaaggtgactccggccaaggcggacggcgagggcggcgccgtcgtcagctgggccatggagttcgacaaggccaacgaccaggtgcctgacccggacgtcatcaaggagaccgccaccaagacgttccacgacctcgacgactacctcctcaagaactagacccagctttcttgtacaaagttggcattataagaaagcattgcttatcaatttgttgcaacgaacaggtcactatcagtcaaaataaaat

SEQ ID NO: 332 - protein, 154 aa, Zea mays
MASKVELVVEVKSPADKLWAALRDSTELFPKIFPEQYKSIETVEGDGKSAGTVRLLKYTEAVPMLTFAKEKLETADDENKVVSYSVVDGELADFYKNFKITLKVTPAKADGEGGAVVSWAMEFDKANDQVPDPDVIKETATKTFHDLDDYLLKN

SEQ ID NO: 333 - DNA, 569 bp, Zea mays
tacaaaaaagcaggcttaaacaatggagtctaccgcgctaatgaccgcgagactaccactgctgacctctggctcccgttccaaacccctcccctttgcttccttcaccagggcggcttgccgtctcgcctccgcccccttctccggcagcggcagcgtcgtcctgctgtcgcgccggagccgcgactatgctggcgttggttccttggtctccgccgcggcggatcctggggatacggcggacgccggatccgagtccatcctgctcagcgtccaggggatgatgtgcgacgggtgcgccgcgagcgtgaagcggatcctggagagccaacccgaggttacttctgctaccgttgattttaaggaagcaagcgcagtcgtgtggacaacagatgaggccaaggggacacaaggttggcagaagcagtatggagagaagcttgctaagcaccttggcacttgcggatttgagtctcgcctacaagatgatcaacgaacgatcacgtgaacccagctttcttgtacaaagttggcattataagaaagcattgcttatcaatttgttgcaa

SEQ ID NO: 334 - protein, 161 aa, Zea mays
MESTALMTARLPLLTSGSRSKPLPFASFTRAACRLASAPFSGSGSVVLLSRRSRDYAGVGSLVSAAADPGDTADAGSESILLSVQGMMCDGCAASVKRILESQPEVTSATVDFKEASAVVWTTDEAKGTQGWQKQYGEKLAKHLGTCGFESRLQDDQRTIT

SEQ ID NO: 335 - DNA, 1038 bp, Zea mays
gccccaaataatgattttattttgactgatagtgacctgttcgttgcaacaaattgatgagcaatgcttttttataatgccaactttgtacaaaaaagcaggcttaaacaatggagatcaaagcacgacagctactgctggctgtttttggcattgtaatagcgataggtttcgccaatgccgtgcaaggggagacagcgccgccggttgttgtcggcttggccaagtgctccgactgcgccaggaggaacatggacgccgaggcagctttcaaaggtcttcaggtggccgtcaagtgtaagaacagcaagggcgagtacgagagcacggccgtgggacaggtgggcaggtccggcgccttccgcgtcccgctggcggccgccgacgtcgttggcgaggacggggagctcaagtcggaatgcttcgcgcagctgcacagcgcgtcgagcgcgccgtgccccgggcaggagccctccaagatcgtcgcggcgccacccggccacgacgccaacggggagaagacgtacgtcgcgctcggcggcaaggtctaccgctcgtcgcccgagtgcgcttcggctttcctttgccaccctttcttccacagcattatgcaccaccaccacgtagggacccacaagcatgtggttattcctcacctgcctgtgcctgatcacggtcacggccattctggcgtgccagtgccacctgtcaccaagccgccggtagacgtccctgagcacaaaccggcgccggtgcccgtgccagagcacaagcctccgtcgtcgacgccggtggacactcctccgtcgacgccggtgggcactccaccatcgacgccggtggacccagcgccgtcaacgccggtgtattcgccgccgaagccaacccccagctactaccacccgccggcgcagcgcgacgctgccactggcccgtagacccagctttcttgtacaaagttggcattataagaaagcattgcttatcaatttgttgcaacgaacaggtcactatcagtcaaaataaaatcattatttg

SEQ ID NO: 336 - protein, 275 aa, Zea mays
MEIKARQLLLAVFGIVIAIGFANAVQGETAPPVVVGLAKCSDCARRNMDAEAAFKGLQVAVKCKNSKGEYESTAVGQVGRSGAFRVPLAAADVVGEDGELKSECFAQLHSASSAPCPGQEPSKIVAAPPGHDANGEKTYVALGGKVYRSSPECASAFLCHPFFHSIMHHHHVGTHKHVVIPHLPVPDHGHGHSGVPVPPVTKPPVDVPEHKPAPVPVPEHKPPSSTPVDTPPSTPVGTPPSTPVDPAPSTPVYSPPKPTPSYYHPPAQRDAATGP

SEQ ID NO: 337 - DNA, 780 bp, Zea mays
gacctgttcgttgcaacaaattgatgagcaatgcttttttataatgccaactttgtacaaaaaagcaggcttaaacaatggtatcagttaatcttgggttagttcattatgtactggaccacatatatggaacacttcttcatcgcaccaaactaggaacaccatttttctcaaaaggatggggaggtaccaaacttgatttgctagagaagatggtgaagcagttgtttcccgaggcacgttgccaaaactggccaccaactgctgtgcagccaatgtggaaaacagtatgggagacaaacaattcttgtctgcgagaaggagttttcaggactacatgtgatgagcgactaatcgatgcattgccacctgagagtcacaatgcaagagttgcttttcttacccctaaaaatgttacacctgagaagatgtcatgtgtggtccatcttgcaggcactggtgatcacacatttgagcgcaggcttcggctgggtgggcctcttcttaagaacaatattgcaactatggttcttgagagcccctattatggacagcgacgtcctagcatgcagcgtggtgcaaagctccagtgtgttagtgatctgttacttctagggaaagccacaattgatgaagctcgcagtctcctgtactggctgcagaatgaggctggttacggcaagatgggcatatgtgggctcagcatgggtatgtaaacccagctttcttgtacaaagttggcattataagaaagcattgcttatcaatttgttgcaacga

SEQ ID NO: 338 - protein, 212 aa, Zea mays
MVSVNLGLVHYVLDHIYGTLLHRTKLGTPFFSKGWGGTKLDLLEKMVKQLFPEARCQNWPPTAVQPMWKTVWETNNSCLREGVFRTTCDERLIDALPPESHNARVAFLTPKNVTPEKMSCVVHLAGTGDHTFERRLRLGGPLLKNNIATMVLESPYYGQRRPSMQRGAKLQCVSDLLLLGKATIDEARSLLYWLQNEAGYGKMGICGLSMGM

SEQ ID NO: 339 - DNA, 957 bp, Zea mays
tgattttattttgactgatagtgacctgttcgttgcaacaaattgatgagcaatgcttttttataatgccaactttgtacaaaaaagcaggcttaaacaatggacagtaacagatccatggcgacgagcggcgtggctccgttcgtggccaagacgtaccgcatggtggatgacccggcgaccgacggcgtggtcgcgtggggcagggacaacaacagcttcgtcgtggccgaccccttcgccttctcgcagacgctcctgcccgcgcacttcaagcactccaacttctccagcttcgtgcgccagctcaacacctacggcttccggaaggtcgatccggaccggtgggagttcgcgcacgtgtcgttccttcgcggccagacgcatctcctgggccagatcgtccgccggagcaacggcggtaagcgcaaggacgacggcaacggtgccggctccggctccgccgacgacgaggacgcggtagccatggaggtggtccggctgaggcgggagcagcgggccatcgaggagcaggtggccgcgatgtggcgtcgcgtgcaggagacggagcgccggcccaagcagatgctcgcgttcctcgtcaaggtcgcgggcgacccgcaggtgctgcgccgcctcgtctccggcgccgggggcgacgccgtgttcgccgccgcggagccggaggacggcgcgagcatcaagagggcgcggctgcttctcgatgccggaagcggcggcgacggcgccgtcgacttcagcgggctctatagcacaaccgccggaagcgaagacgacggcgtcgggttcggcagcgattacctgcagccgccaccgccgtacgtgttccccgtcaacagcggcggctactgaacccagctttcttgtacaaagttggcattataagaaagcattgcttatcaatttgttgcaacgaacaggtcactatcagtcaaa

SEQ ID NO: 340 - protein, 257 aa, Zea mays
MDSNRSMATSGVAPFVAKTYRMVDDPATDGVVAWGRDNNSFVVADPFAFSQTLLPAHFKHSNFSSFVRQLNTYGFRKVDPDRWEFAHVSFLRGQTHLLGQIVRRSNGGKRKDDGNGAGSGSADDEDAVAMEVVRLRREQRAIEEQVAAMWRRVQETERRPKQMLAFLVKVAGDPQVLRRLVSGAGGDAVFAAAEPEDGASIKRARLLLDAGSGGDGAVDFSGLYSTTAGSEDDGVGFGSDYLQPPPPYVFPVNSGGY

SEQ ID NO: 341 - DNA, 3288 bp, Zea mays
atgatgttcacggagggcctcgacgagtcggcgatcagctggatcaagcagggcatggactccccagcctcagccccagcccccgcacccccacggtccccgctgtcggagcgcccgccgctgggacaggtggcggcggcgccgaggagccccgcgctgcacgccaggccgtgcggggccggcgcaggcgtcggtttcttctcccccaagggcctcccgcaagtgcgggtgaacgggacgcaccactcgggcctgctcggccgccactccgtgctcctctcggtcgcggactccgatgagtgggaggacgagagcgtcgcatcgtggggcatgcccgaggactgctacggcggcggcaacttctccgagaccggcgacgaggcgtgctccagcgactccagactcatgcggagggccatggaccgctgcggcggagggtgggatgaggaggtcacgtcgcagctgagcaggaagggcggcggcggcgggatcgtgcgggggcagtccaaggagttcctgcgggtggaagtgcgaggtgcgggagcgttcgatgccgggaagtgctccggttccggggcacaacatccagtggactccatctcgcagggacgctactttgaggagcaggtattggggactcctagtgcccctccaattgcaggggtcgaggaggatgttatgtttcatgcagttgaaagggctgaaatggatggagggcttgagaggaatggagtatcatcagtagcagatatactggcccaagatgttcatgagcttcatacgagctcaattgttcatgaagatggcgttgagaataacttattagctcagataccgagcttcactattaagttatgtctgaatgcatgggcaagaaactgcatggaagctccagacttccttcgggatgagtgcatggtactgcgaagtgcctttggaatacagaacttcttgcttcatccaaaacacaatagtcaagttgatggtaaacaaatgtatgataaggatggaaattgtactataaagggaaggaaacttgttaaacagattgagattgaagtaaaaaagatacgggttgtacctcaaagaccaaagcttcgagcaacatcatcctttagaaatctctacatgcaagctggcagtgagtatgtcagacagatttctaagattctgaagagccaggttacgatgttgacatccacatcatctacatctttgccggaagaaatgttcacatgcactctagaactgcaaagttcttgcaaaggtcataagagagattcaatttctccacaatatttgaagccagggactggtgaatctcaactcttttatctagagagccagggggatgttattcttgttgaagtacaagacaacaatagggttgtcataggccgtgcaaaaattcaagtttcatcattgactgatactcaagtatgtctaaacaaattcatgagtttagtgcaaatgtttcatgataattctgtagtcactgaaggagtttgtatttggacaaatttgaaaagcagcaggatgaaatcatcaggtggtggcctctatatcttgatgatcaagattgtgtcggaaaagttcagcttgatgctgcaaggtggccctgcagtggataccatcatatatgacatggttctggaagcggcaatgagggctcaaaatttcaacagcaaaatgcttcatatcaatggtccatggatttggctgttggacgagttttctgattactatggaatatctgatgcatatagaaaattgaggtacttgtcttacatcatgaacgtggcaataccaaccaaggattgtttggaacttatatatgaacttatcgttccagtcacaaaagcacgagaagatagaactttaacaagacaagagcgaagtattttgatagactgtgaagatcggattaagagtctccttgcagctctgtttgaaaattacaaatcactggatgaatattctccaactggcttgtcagatttatttggccccataacagattctgctgcaccagctttggcacctgctgttcagatattcagtgtactgcatgacattctctccaaagaagcacaagacatacttaggaactatttgcagattgctgctgcgaaaaggtgcaggaggcatatgatcgagacagatgaattcttatcaagcaataacgacagtcttcttacggaccctatgactatatctgctgcatatcttaaaatgaagacattgtgcattaacatgagtcgtgaaattcaagctgacattaagattcacaaccagaatatacttccaagacctgttcatggcggcgtaatttcgagacagctctttcatgactacatcatggtgtggattgaagacactcgattgcagttacttgataattgcaaagctgagaagatatcatgccctgccgtgtcaacagtctcgccatttgttgagcaaatgtatgagcaaataaaagagagcataaatgagtatggagtggttatcaatagatggcctcaatatctgatgagtttagagagtgctgttgctgatgttgagagagaaattatgaaggcactggagaagcaatacatggatattctaatgcccctaagagatggcataccagaaaaaattgagaagcaggtccagagattaacaagaagacaatctatagctccctatgttgtgccaaatcagttaggagcattcatgaacacagtaaaaaggatgctagatgtgttacactgccgagtcgaagacattctcaagtcatgggcagcgtaccttactatatcatgtgggaacactgtttttggagagcaaatgaactccatcacagtcatgctgaagaagaagtacaagaaatacctgcaagcgatagtggacaagcttgtcagcaacacacaagctaatcggaatacgagactcaagcgaattcttgaagaaacaagagaggctgatggtgaaagtgatatacgagataggatgcaggctgtccgcctccagctctcggattcaattcacaatctgcatgaggtcttctccagcagaatatttgttgctatttgccgaggtttctgggatcggttaggccagattgtgttgagatttcttgagagcagaaaggagaacaggatttggtaccgaggatctgactatgctctagggatccttgacgatgtctttgcatcggagatgcaaaagctgctgggcagcgctctgcaggacaaggacctggatccaccgcagtcagtgattgacgcccgctccatcctctgctag

SEQ ID NO: 342 - protein, 1095 aa, Zea mays
MMFTEGLDESAISWIKQGMDSPASAPAPAPPRSPLSERPPLGQVAAAPRSPALHARPCGAGAGVGFFSPKGLPQVRVNGTHHSGLLGRHSVLLSVADSDEWEDESVASWGMPEDCYGGGNFSETGDEACSSDSRLMRRAMDRCGGGWDEEVTSQLSRKGGGGGIVRGQSKEFLRVEVRGAGAFDAGKCSGSGAQHPVDSISQGRYFEEQVLGTPSAPPIAGVEEDVMFHAVERAEMDGGLERNGVSSVADILAQDVHELHTSSIVHEDGVENNLLAQIPSFTIKLCLNAWARNCMEAPDFLRDECMVLRSAFGIQNFLLHPKHNSQVDGKQMYDKDGNCTIKGRKLVKQIEIEVKKIRVVPQRPKLRATSSFRNLYMQAGSEYVRQISKILKSQVTMLTSTSSTSLPEEMFTCTLELQSSCKGHKRDSISPQYLKPGTGESQLFYLESQGDVILVEVQDNNRVVIGRAKIQVSSLTDTQVCLNKFMSLVQMFHDNSVVTEGVCIWTNLKSSRMKSSGGGLYILMIKIVSEKFSLMLQGGPAVDTIIYDMVLEAAMRAQNFNSKMLHINGPWIWLLDEFSDYYGISDAYRKLRYLSYIMNVAIPTKDCLELIYELIVPVTKAREDRTLTRQERSILIDCEDRIKSLLAALFENYKSLDEYSPTGLSDLFGPITDSAAPALAPAVQIFSVLHDILSKEAQDILRNYLQIAAAKRCRRHMIETDEFLSSNNDSLLTDPMTISAAYLKMKTLCINMSREIQADIKIHNQNILPRPVHGGVISRQLFHDYIMVWIEDTRLQLLDNCKAEKISCPAVSTVSPFVEQMYEQIKESINEYGVVINRWPQYLMSLESAVADVEREIMKALEKQYMDILMPLRDGIPEKIEKQVQRLTRRQSIAPYVVPNQLGAFMNTVKRMLDVLHCRVEDILKSWAAYLTISCGNTVFGEQMNSITVMLKKKYKKYLQAIVDKLVSNTQANRNTRLKRILEETREADGESDIRDRMQAVRLQLSDSIHNLHEVFSSRIFVAICRGFWDRLGQIVLRFLESRKENRIWYRGSDYALGILDDVFASEMQKLLGSALQDKDLDPPQSVIDARSILC

SEQ ID NO: 343 - DNA, 957 bp, Zea mays
ggccccaaataatgattttattttgactgatagtgacctgttcgttgcaacaaattgatgagcaatgcttttttataatgccaactttgtacaaaaaagcaggcttaaacaatgtcgcagtggtgggggggctgggacccggacacgctccgcccgaccagcgacgtccggttgctggacgtccccgccggcacgtggaggcgcggcccgaagatgccggacagccggagcttcttcggatgcgctgggggcggcggcaacgtctacgtcgccggcggacacgacgagtgcaagaacgctctccgctccgccttcgcgtacagcgtcgcggccgacgcctggcgcgcactcccggacatgttggaggagcgtgacgagccgcagctcgtcgtggcgaccccgggccgcgtcctcgccgccagcggctacccgaccgaagcccagggcgcgttcaaggataccgccgagtggtacaacgccggcggcggcgcgtggaccagcgagtgcgacgtggtacccgacggcgacacggctgggacgtgcctggcgtcggtgcgcgggacggtgtgggccgtcggggccgggaacggcggcgtgcgggaatgggacggcgccgcgcgcgcgtggaaggacgtggccgacgggccgccgggcatgaaggcctgcttgaaggcggttggcgttggcaacggcggggccgtgctcgtgttcggcacagtggcagacgcggcggcggagggcgtcaactactctgcgtgggtcatggaagcgagcagcggtgcatggaagcgagtgcccgtgccgtcaggattcggcgggttcgtttactcagccgcagccgtgcctgtttagacccagctttcttgtacaaagttggcattataagaaagcattgcttatcaatttgttgcaacgaacaggtcactatcagtcaaaataaaatcattatttgccatc

SEQ ID NO: 344 - protein, 246 aa, Zea mays
MSQWWGGWDPDTLRPTSDVRLLDVPAGTWRRGPKMPDSRSFFGCAGGGGNVYVAGGHDECKNALRSAFAYSVAADAWRALPDMLEERDEPQLVVATPGRVLAASGYPTEAQGAFKDTAEWYNAGGGAWTSECDVVPDGDTAGTCLASVRGTVWAVGAGNGGVREWDGAARAWKDVADGPPGMKACLKAVGVGNGGAVLVFGTVADAAAEGVNYSAWVMEASSGAWKRVPVPSGFGGFVYSAAAVPV

SEQ ID NO: 345 - DNA, 655 bp, Zea mays
atgattttattttgactgatagtgacctgttcgttgcaacaaattgatgagcaatgcttttttataatgccaactttgtacaaaaaagcaggcttaaacaatggcggctgtgctgaacagcaggaagacgccgcaggtggtggccgtgctggtggtggtggcgctgctggcttcgtccgcgtcggcggcgatcacctgcgggcaggtggggtcgtcgctggcgccgtgcatcccttacgcgacggggagggccagcgcgctcccctcgtcgtgctgcagcggcgtcaagagcctcaacagcgcggcgcggaccagcgcggaccgccaggcggcgtgccgctgcctcaagagcctcgccaacagcgtcaagagcgtcaacatgggcaccgtcgccaccatccccggcaagtgcggcgtctccgtcggattccccatcagcatgtccaccgactgcaacaagtacgtgatccagcttgcttgcttgctgtcatcatccatgcatatgcatctccatctttcatttttctcaattcttttggggcacgcatgcaggatcagctaaacccagctttcttgtacaaagttggcattataagaaagcattgcttatcaatttgttgcaacgaacaggtcactatcagtcaaaataaaatca

SEQ ID NO: 346 - protein, 153 aa, Zea mays
MAAVLNSRKTPQVVAVLVVVALLASSASAAITCGQVGSSLAPCIPYATGRASALPSSCCSGVKSLNSAARTSADRQAACRCLKSLANSVKSVNMGTVATIPGKCGVSVGFPISMSTDCNKYVIQLACLLSSSMHMHLHLSFFSILLGHACRIS

SEQ ID NO: 347 - DNA, 1422 bp, Zea mays
atgactatgacccccgctccggtggcgaacggcgcagcggccggcgctggcgggggcatgaagcggcggggcggtaggttgtggtacgcggccgccggtgccctcctcgtggccctcctcgccgtggccgtgagctaccgcagcttcccgggcgtcccttcctccccctcgtcacctggaagctgcggctgccctgctgcgaggaagtacacggggatggtggaggactgctgctgcgactatgagacggtggacgccatcaacgaggaggtcctgcatccaatcctacaggaactcgttaagttgcccttcttcaggtacttcaaggttaaattgtggtgtgactgccctttttggcccgatgatggaatgtgcaagcttagagattgtagtgtttgtgagtgtccggagaatgagttccctgaaccattcaggaaaccttacaatggactttctccagatagtatgatgtgccaagaaggaaaaccccaggctgccgttgataaaactcttgacagcaaggttttcaaaggatgggttgaaactgacaatccgtggacatctgatgacgagactgataataatgagatgacttacgtgaatcttcaactgaatcctgaacgatacactggctatactggtgattcagcaagaagaatatgggacgctatttacaaagagaactgtccaaaatatccctctgaagaactgtgccatgagaagaaggcattgtacaagcttatttcaggattgcactcctcaatttcagtgcatattgcttatgattaccttcttgatgaatctactaactcatggggacaaaatcttcctttgttgtatgaccgcgtcctgaagtacccagaacgtgtccagaatctgtacttcacctacctgtttgttcttcgggccgtgacaaaggcagcaaattatcttgagcaggctgagtacaataccggcaatcctgaagacgacttgaaaacagaatctcttgtgaagcagttgctttacaattccaagttaagatctgcatgtccattgccttttgatgaagccaaactttggcaaggcgaaaatggtcctgagctaaagcaagagattcagaagcaatttagaaacattagtgcaattatggactgtgttggatgcgagaagtgccgactgtggggaaagctccaagttcatggtcttggaactgcactgaaaattcttttctctgttgatggggacagccatatgaatcagccattgcagctgcagcgaaatgaggtcattgcattgttcaatcttctgaacaggctctcagagtctgtcaaatttgtacatgaaaaaggatcatcaattgaagaagtcattgaggaacagatcccttcaacggttcaaaagagtgtttccatgccgaatcttaaactggacttcctctga

SEQ ID NO: 348 - protein, 473 aa, Zea mays
MTMTPAPVANGAAAGAGGGMKRRGGRLWYAAAGALLVALLAVAVSYRSFPGVPSSPSSPGSCGCPAARKYTGMVEDCCCDYETVDAINEEVLHPILQELVKLPFFRYFKVKLWCDCPFWPDDGMCKLRDCSVCECPENEFPEPFRKPYNGLSPDSMMCQEGKPQAAVDKTLDSKVFKGWVETDNPWTSDDETDNNEMTYVNLQLNPERYTGYTGDSARRIWDAIYKENCPKYPSEELCHEKKALYKLISGLHSSISVHIAYDYLLDESTNSWGQNLPLLYDRVLKYPERVQNLYFTYLFVLRAVTKAANYLEQAEYNTGNPEDDLKTESLVKQLLYNSKLRSACPLPFDEAKLWQGENGPELKQEIQKQFRNISAIMDCVGCEKCRLWGKLQVHGLGTALKILFSVDGDSHMNQPLQLQRNEVIALFNLLNRLSESVKFVHEKGSSIEEVIEEQIPSTVQKSVSMPNLKLDFL

SEQ ID NO: 349 - DNA, 1276 bp, Zea mays
ttgactgatagtgacctgttcgttgcaacaaattgatgagcaatgcttttttataatgccaactttgtacaaaaaagcaggcttaaacaatggacagggagcttctagagacgtttgacgcggccaagaaggcggccgacgaggcggcaggggacggcaactcgccggaggctggccgctgcctcgacgcgctgcggcggctgcgcgacattcgcgtcaacaccgacatcctcgtctcgacgcaggttggcaaacgccttcgaccccttactaagcatcctcactcaggcattcaagcagttgctgcagacctttttgggtactggaaaaaggttgtccttgaagagtcaggaaagaaaaatggcggctcagagaatgaaagatcaagtgactcttcaggaaaggttgagaaggtgaggcccgtgaagattgaaaagaactctgcatcagcaagcatgaagcttgagaaaagagatgtggatgttaggggtcagaagcctaacaatgtcaaagttgagaagactactagtaatggttccaaagctcaatctgtgaaggtggaaagggtatccaaagaagtcataaggactcctgactcgaagaggccagcatccgtccccaatggccacccaaagcttacatctcttgtcaaatgcaatgatcctacccgagataaaatccgggaactacttgctgaagcctttgtaagtgtttccagagagacttgtgatgatgacagagacgaagtgaaaaacatcttggatgaagtcgaggcatgcgacccatacagggttgccgtgacagtagagtctgcactattcgagaggcttggaccttccactgggactcacagggcgaaatacaggtcaatcatgttcaacctgagggctgaaaacaataccgatttccggaggagggtcctcatcggtctagtggcgccggagaggcttccagacataccccctgatgagatggctagcgacgcaaggaagcaagagaacatgcagatcaaggagaaggctctgttcgactgcgagcgtggagcggcaccaaaggcgacgacggaccagttcaagtgtgccagatgtgggcagcggaagacgacctactaccagctgcagactcggagtgctgatgaaccgatgacgacgttcgtcacgtgcgtgaactgcaacaatcactggaagttctgctgaacccagctttcttgtacaaagttggcattataagaaagcattgcttatcaatttgttgcaacgaacaggtcactatcagt

SEQ ID NO: 350 - protein, 368 aa, Zea mays
MDRELLETFDAAKKAADEAAGDGNSPEAGRCLDALRRLRDIRVNTDILVSTQVGKRLRPLTKHPHSGIQAVAADLFGYWKKVVLEESGKKNGGSENERSSDSSGKVEKVRPVKIEKNSASASMKLEKRDVDVRGQKPNNVKVEKTTSNGSKAQSVKVERVSKEVIRTPDSKRPASVPNGHPKLTSLVKCNDPTRDKIRELLAEAFVSVSRETCDDDRDEVKNILDEVEACDPYRVAVTVESALFERLGPSTGTHRAKYRSIMFNLRAENNTDFRRRVLIGLVAPERLPDIPPDEMASDARKQENMQIKEKALFDCERGAAPKATTDQFKCARCGQRKTTYYQLQTRSADEPMTTFVTCVNCNNHWKFC

SEQ ID NO: 351 - DNA, 2595 bp, Zea mays
atgctgagcgggatcatcgacgggctgacgggggcgaacaagcatgcgcggctcaagggcacggtggtgctcatgcgcaagaacgtgctggacctcaacgacttcggcgccaccgtcgttgacagcatcagcgagttcctcggcaagggggtcacctgccagctcatcagctccaccctcgtcgacgccaacaacggcaaccgcgggcgggtcggggcggaggcgaacctggagcagtggctgacgagcctgccgtcgctgacgaccggcgagtccaagttcggcgtcacgttcgactgggaggtggagaagctgggagtgccgggggccgtcgtcgtcaagaacaaccacgccgccgagttcttcctcaagacaatcaccctcgacgacgtgcccggccgcggcgccgtcaccttcgtcgccaactcctgggtctaccccgcgggcaagtaccgctacaaccgcgtcttcttctccaacgatacgtacctgccaagccagatgccggcggcgctgaagccgtaccgcgacgacgagctccgcaacctccgcggcgacgaccagcagggcccctaccaggagcacgaccgcgtgtaccgctacgacgtctacaacgacctcggcgagcccgacggcggcaacccgcgccccatcctcggcggctccgccgaccacccgtacccgcgccgctgccgcacgggccgcaagcccaccaaaaccgaccccaactcggagagccgactgtcgctggtggagcagatctacgtgccgcgggacgagcgcttcggccacctcaagatgtccgacttcctgggctactccatcaaggccatcacgcagggcatcatcccggcggtgcgcacgtacgtggacaccaccccgggcgagttcgactccttccaggacatcatcaacctgtacgagggcgggatcaagctgcccaagatccaggcgctcgaggacatgcgcaagctcttcccgctccagctcgtcaaggacctcctccccgccggcggggactacctgctcaagctccccatcccacagatcatccaagaggacaagaacgcgtggaggaccgacgaggagttcgcgcgggaggtgctcgccggcgtcaacccgatggtgatcacgcgcctcacggagttcccgcccaagagcacgctggaccccagcaagtacggcgaccacaccagcacgatcacggcggagcacatcgagaagaacctcgagggcctcacggtgcagcaggcgctggacggcaacaggctctacatcctggaccaccacgaccgcttcatgccgttcctcatcgacgtcaacaacctggagggcaacttcatctacgccaccaggacgctcttcttcctgcgcggcgacggcaggctcgcgcccctcgccatcgagctcagcgagccgtacatcgacggggacctcaccgtggccaagagcaaggtctacacgccggcgtccagcggcgtcgaggcctgggtgtggcagctcgccaaggcctatgtcgccgtcaacgactctggctggcaccaactcgtcagccactggctgaacacccacgcggtgatggagccgttcgtgatcgcgacgaaccggcagctgagcgtgacgcacccggtgcacaagctcctgagctcgcacttccgcgacaccatgaccatcaacgcgctggcgcggcagacgctcatcaacggcggcggcatcttcgagatgaccgtcttcccgggcaagtacgcgctgggcatgtcctccgtggtgtacaagagctggaacttcaccgagcagggcctccccgccgacctcgtcaagaggggcgtggcggtggcggacccgtccagcccgtacaaggtgcggctgctgatcgaggactacccgtacgcgagcgacgggctggccatctggcacgccatcgagcagtgggtgggcgagtacctggccatctactaccccgacgacggcgcgctgcggggcgacgaggagctgcaggcgtggtggaaggaggtgcgcgaggtcgggcacggcgaccacaaggacgcgccctggtggcccaagatgcaggccgtgtcggagctcgccagcgcctgcaccaccatcatctggatcgcgtcggcgctccacgccgccgtcaacttcggccagtacccgtacgcggggtacctcccgaacaggcccacggtgagccggcgccggatgccggagcccggcagcaaggagtacgaggagctggagcgcgacccggagcgcggcttcatccacaccatcacgagccagatccagaccatcatcggcatctcgctcatcgagatcctctccaagcactcctccgacgaggtgtacctcggccagcgcgacacccccgagtggacctccgacgcccgggcgctggcggcgttcaagaggttcagcgacgcgctggtcaagatcgagggcaaggtggtgggcgagaaccgcgacccgcagctgaggaacaggaacggccccgccgagttcccctacatgctgctctatcccaacacctctgaccacagtggcgccgccgcagggctcactgccaagggcatccccaacagcatctccatctga

SEQ ID NO: 352 - protein, 864 aa, Zea mays
MLSGIIDGLTGANKHARLKGTVVLMRKNVLDLNDFGATVVDSISEFLGKGVTCQLISSTLVDANNGNRGRVGAEANLEQWLTSLPSLTTGESKFGVTFDWEVEKLGVPGAVVVKNNHAAEFFLKTITLDDVPGRGAVTFVANSWVYPAGKYRYNRVFFSNDTYLPSQMPAALKPYRDDELRNLRGDDQQGPYQEHDRVYRYDVYNDLGEPDGGNPRPILGGSADHPYPRRCRTGRKPTKTDPNSESRLSLVEQIYVPRDERFGHLKMSDFLGYSIKAITQGIIPAVRTYVDTTPGEFDSFQDIINLYEGGIKLPKIQALEDMRKLFPLQLVKDLLPAGGDYLLKLPIPQIIQEDKNAWRTDEEFAREVLAGVNPMVITRLTEFPPKSTLDPSKYGDHTSTITAEHIEKNLEGLTVQQALDGNRLYILDHHDRFMPFLIDVNNLEGNFIYATRTLFFLRGDGRLAPLAIELSEPYIDGDLTVAKSKVYTPASSGVEAWVWQLAKAYVAVNDSGWHQLVSHWLNTHAVMEPFVIATNRQLSVTHPVHKLLSSHFRDTMTINALARQTLINGGGIFEMTVFPGKYALGMSSVVYKSWNFTEQGLPADLVKRGVAVADPSSPYKVRLLIEDYPYASDGLAIWHAIEQWVGEYLAIYYPDDGALRGDEELQAWWKEVREVGHGDHKDAPWWPKMQAVSELASACTTIIWIASALHAAVNFGQYPYAGYLPNRPTVSRRRMPEPGSKEYEELERDPERGFIHTITSQIQTIIGISLIEILSKHSSDEVYLGQRDTPEWTSDARALAAFKRFSDALVKIEGKVVGENRDPQLRNRNGPAEFPYMLLYPNTSDHSGAAAGLTAKGIPNSISI

SEQ ID NO: 353 - DNA, 2023 bp, Zea mays
tgatagtgacctgttcgttgcaacaaattgatgagcaatgcttttttataatgccaactttgtacaaaaaagcaggcttaaacaatggagtcctcgctcctcctctctaccccgcgcccgctcaagcccttccatccgcatcacttccccaccgctcgtcgtcgcgacgcgtccttccgcgggaagccccctccgccgccgcccctgccaccgctcggacgcggcagccgccggttgggtcgggcggtgccgcgcgcctcgagcgaggcgttcggcgacggattccgcagccaggacaggcctcccggggttagcagcgggggtgttcgccggaggacctaccgcgaggcgcagggcgaggcggccgtgccacccgtggccgcggccgcgagagcagtcgcgccctacgtcgccccggtcggggcagtactcatgctgagctttgtcatatggaaggtggttcagaatatgattccagggaagaaaaaggatcatggttctggaaaacatgcgccttctggtatcatgtggtccttcgctgctggctccaatttggcaacatctaccctcagtgctgaaaaggagtcgcggaaaaatctgaacaagttctacaaagaacttcgaactttgaaaactgttaacatggctggtcgtcagtttggagatgagggcctgttttttctagcagaaagcttagcctatgacaagagtgcagaagaggtggacttttctggcaatgggataacagctgtggggatagaagcctttgatggagttcttcagataaacacaactttgaaaactctcaatttatctggaaatgacatcggggatgaaggagctaagtgtctttcagatatattggttgaaaatgtgggtatccagaaactcctcctgaacagtatcaatattggggacgagggtgccaaggcactttcgaacatgctgaaaaagaataaatcaatacgtattctacagttcagcaataatgcaattgaatacagtggttttgcaagtattgcagaagcccttttagagaataatacgatacggagcttgtatctcaatggcaactatggtggtccccttggtgcatgcagcctagctcaaggaattctagggaataagtctttaagggaaattcacttgcatggtaatgggattgggaatgagggaatacgtgagttgatgtctgcattatctgctcacaaagggaagatcacagttgtggatattggcaacaacaacattagcccggaaggtttacatcctgtagccgagttcctcaaaaggacaaagtccttacagtggttcagtctctacatgaacgatattagtgatgagggagctgaaaaggttgctgaggctctgaaagataacaaaacaatttctaccatagacttgggtggcaataacattcactccaaagctgttagtgcagtagcggaaactttgaaggataatgcagtgctgacaacactggatttgagctacaatccaattggatcagacggagtaaaggctttgtgcgatgtcctcaagttccatgggaagatccaaacccttaagctcggctggtgccagataggcatggaaggtgcagagtgtattgccgactgtctcaagtacaacacaacgttatcgacattggatctgcgggcaaacgggcttggaaacgatggtgctatatgcttggcgcgaagtttcaagataatcaacgaatcgttgacgtcccttgacctgggtttcaatgagattcaagacgacggagcattcgcattggcacaggcgctcaaggctaacgaggatctggcggtcacgtcattaaatctcgcaaacaacttcttcacgaaattcggacaggtcgctctttctgaggcgcgggaccatgtgtacgagatgaccgaacgggagatagacatttatttttagacccagctttcttgtacaaagttggcattataagaaagcattgcttatcaatttgttgcaacgaacaggtcactatcagtcaaaataaaat

SEQ ID NO: 354 - protein, 615 aa, Zea mays
MESSLLLSTPRPLKPFHPHHFPTARRRDASFRGKPPPPPPLPPLGRGSRRLGRAVPRASSEAFGDGFRSQDRPPGVSSGGVRRRTYREAQGEAAVPPVAAAARAVAPYVAPVGAVLMLSFVIWKVVQNMIPGKKKDHGSGKHAPSGIMWSFAAGSNLATSTLSAEKESRKNLNKFYKELRTLKTVNMAGRQFGDEGLFFLAESLAYDKSAEEVDFSGNGITAVGIEAFDGVLQINTTLKTLNLSGNDIGDEGAKCLSDILVENVGIQKLLLNSINIGDEGAKALSNMLKKNKSIRILQFSNNAIEYSGFASIAEALLENNTIRSLYLNGNYGGPLGACSLAQGILGNKSLREIHLHGNGIGNEGIRELMSALSAHKGKITVVDIGNNNISPEGLHPVAEFLKRTKSLQWFSLYMNDISDEGAEKVAEALKDNKTISTIDLGGNNIHSKAVSAVAETLKDNAVLTTLDLSYNPIGSDGVKALCDVLKFHGKIQTLKLGWCQIGMEGAECIADCLKYNTTLSTLDLRANGLGNDGAICLARSFKIINESLTSLDLGFNEIQDDGAFALAQALKANEDLAVTSLNLANNFFTKFGQVALSEARDHVYEMTEREIDIYF

SEQ ID NO: 355 - DNA, 879 bp, Zea mays
ttttgactgatagtgacctgttcgttgcaacaaattgatgagcaatgcttttttataatgccaactttgtacaaaaaagcaggcttaaacaatgccgccgaggaggaaacggcgagcaccaccggccaagtcgcagaggcagacggagccggatccgcaaccgcaagtgccccctggcgccgacgcgccgctggaagagcggctgatatggggcagccaacaagaaagcgagcgccggattactgccatcaaagccataaaagacgcggaggctgggaacatacattaccagttgcaattggcacggtcctattattccgaggagcaattggagggaaacgccatgcagtattttcaggagaacttgcacaatctgtcggttgttccgaacgaggaatatgatgtgcttgagctgaaatggaataacggcggcgaatggatgattggagactttgcagatgacaggactctacgggcttcgattgcatcattcacagctgctgatggacttcagttcccaagggattcagacttctatacgcgcactagcaatttcagtgactttgcttggagtgagcagcctgaaggccaaatggcaggagcatcagaagcttttcagacacctggggctgtgagtaaccggctatcctgtggcatgacacccaaaactgtgaggctacccaagaatggtgagatgctcctatctgtgcatggttcacctcttggggtctataaagaagaaaatttagcagccattgaagaatctggtaacggaagtgaagatgctccctgaacccagctttcttgtacaaagttggcattataagaaagcattgcttatcaatttgttgcaacgaacaggtcactatcagtcaaaat

SEQ ID NO: 356 - protein, 233 aa, Zea mays
MPPRRKRRAPPAKSQRQTEPDPQPQVPPGADAPLEERLIWGSQQESERRITAIKAIKDAEAGNIHYQLQLARSYYSEEQLEGNAMQYFQENLHNLSVVPNEEYDVLELKWNNGGEWMIGDFADDRTLRASIASFTAADGLQFPRDSDFYTRTSNFSDFAWSEQPEGQMAGASEAFQTPGAVSNRLSCGMTPKTVRLPKNGEMLLSVHGSPLGVYKEENLAAIEESGNGSEDAP

SEQ ID NO: 357 - DNA, 628 bp, Zea mays
gacctgttcgttgcaacaaattgatgagcaatgcttttttataatgccaactttgtacaaaaaagcaggcttaaacaatggcctattgcgcatttgctccatctgcaccacctcaatattctgagcttaagatgactctatacacaaacaaggaggtgtatcgttctgggccagatcaaaacggagtaaccatcacagagagatcaaacatgggcacaacctgggtcttctcgtggcctgtagccgatgggccaacacctgatgcgaacatcgtcggccaactccagggcactagtgttcaagtagccaatactcccgttgtggtgtaccactactccctgggattagtgttcgaggataaaaggttcaatgggtccacactccaaatacaagggacctcccaaataaatggcgagtggagcattgttggagggacaggacaacttactatggcaatgggtactgtcaaacgcactgaagttgtgtacaaagacaataccaggatctcagaactcaaaatacatgcctatttcgctccagtgaattaaacccagctttcttgtacaaagttggcattataagaaagcattgcttatcaatttgttgcaacgaacaggtcactatcagt

SEQ ID NO: 358 - protein, 156 aa, Zea mays
MAYCAFAPSAPPQYSELKMTLYTNKEVYRSGPDQNGVTITERSNMGTTWVFSWPVADGPTPDANIVGQLQGTSVQVANTPVVVYHYSLGLVFEDKRFNGSTLQIQGTSQINGEWSIVGGTGQLTMAMGTVKRTEVVYKDNTRISELKIHAYFAPVN

SEQ ID NO: 359 - DNA, 699 bp, Zea mays
atgggcgacgacgacgaccacaatgaggggctgagggcggggccgacggcgtcgtggcggctcaacgtcagcgacttccacatgccggagcggcccaaggagccgcccttcgtcgccagggtcttcctccgcagccacgggaagcagaggaagatcgcgaagtactacaagaaacaagagaatctactgaaggatttcagcgaaatggagaccatgaacgaaatgggtggcctagatcagaatgctcctaccgaggaagagcagaagcagttggcgaagagcgagaggtttgccatcaacctgtcgaatgcagtcaacctggtcctcttcgtaacaaaagtcgtcgcttcagtcgaaagcgcgtccatggcggttatagcgtcgacgctggactctctgttggacctgctgtcagggttcatactttggttcactgcgtacaagatgaaaaagccgaacaagtacaactatccaattggaaagaggcgcatgcagccagtgggaataatagttttcgcatcagtgatgggcacacttggcttccaagtgctgatcgaatcagggcgccagctcataactcaggagcacgcggatttcaagttcaagcaagagctgtggatggtcattagcatgtcctctgttgcggtcgtgagttcttcctcatgctctactgcagaacgttcaagaatgagatcgtga

SEQ ID NO: 360 - protein, 232 aa, Zea mays
MGDDDDHNEGLRAGPTASWRLNVSDFHMPERPKEPPFVARVFLRSHGKQRKIAKYYKKQENLLKDFSEMETMNEMGGLDQNAPTEEEQKQLAKSERFAINLSNAVNLVLFVTKVVASVESASMAVIASTLDSLLDLLSGFILWFTAYKMKKPNKYNYPIGKRRMQPVGIIVFASVMGTLGFQVLIESGRQLITQEHADFKFKQELWMVISMSSVAVVSSSSCSTAERSRMRS

SEQ ID NO: 361 - DNA, 1480 bp, Zea mays
ttgactgatagtgacctgttcgttgcaacaaattgatgagcaatgcttttttataatgccaactttgtacaaaaaagcaggcttaaacaatggcgagagaagcagcgagcgaagccaccgcaagccgcgaaagcggggcggaggcggcaggggagtgctggagcgaagcgctcaagtcgttcctggaccacatccccgtctcctccgtcccgggcgcgctccaacccactgcctccccagcggtggaggtcaagctccacggctccgtcctgggcgccctcgacgccatgtacagcagcaacgccgcgggcgcggtgatcatcgacgtggtgcacagcagtctaggcaagtacgtcgatcgcgatattggcttcgtcgagttctcgagcctagtcctgtgggcacttgaggaacttggcaaagtggaaagtgaaccaacagacagtacttctgatttcctctctactctgaaacagcatcatcagattgcagaaacgaagcgaaataggacgaatggtggggataaaaacggtgattttttcttctatttttaacattgcggctgttactctggtgaaacaaaacagatcgcctggttagcgaagttgttcctgtgggagccattcttccctgttcggacccatgacacgctgttccacgcaatgcttctcttttcgaaacaccacaggctcaacgtggcaccggttgttgagtcaatgaactcgagtgttattggatttgtcacacaggatgcagtgatggagctgcttctccagtcaagtggccttgagtggcttgataaaattgcagacaagcagctttcggaatttaggtttgcaaatgtgaggaagcctgttttggtgtactcagatcaaactctagctgatgggctgcatattctctcaaaggaaaaaacgggggttgcagtcattgacaggaaaaccagccgtctaattggatcattacagtgcagtgatctctacctgtttctagatgacagcacccttttcagcaagcgaacgacaactactctggaagaattaatcagcctgaataacaagaccgacaggaaatgcagcaccgctgaaaattcatgtgcgcctggccgaaacatcctcgcgctcaggagcaggcagtcaggcatggtgggcctaccagccaccaacctggaatccgacaccctaaagcaagcgatggagaagctgacaactttaaggagcagctgcagcttcatcgtcgacgagcacgggcgcgtccaaggagtggtgaccacaagggacatcatctccgtgttctccccgctgtgcatggactcgaggattgacggggccacgttcttctcggctgcgctcgagcaggctggctgccgcgttgagaacgggcagatgtttcagaattagacccagctttcttgtacaaagttggcattataagaaagcattgcttatcaatttgttgcaacgaacaggtcactatcagt

SEQ ID NO: 362 - protein, 245 aa, Zea mays
MLLFSKHHRLNVAPVVESMNSSVIGFVTQDAVMELLLQSSGLEWLDKIADKQLSEFRFANVRKPVLVYSDQTLADGLHILSKEKTGVAVIDRKTSRLIGSLQCSDLYLFLDDSTLFSKRTTTTLEELISLNNKTDRKCSTAENSCAPGRNILALRSRQSGMVGLPATNLESDTLKQAMEKLTTLRSSCSFIVDEHGRVQGVVTTRDIISVFSPLCMDSRIDGATFFSAALEQAGCRVENGQMFQN

SEQ ID NO: 363 - DNA, 964 bp, Zea mays
ggccccaaataatgattttattttgactgatagtgacctgttcgttgcaacaaattgatgagcaatgcttttttataatgccaactttgtacaaaaaagcaggcttaaacaatggcgatgggcgccgcttccatcctactgatgatggtttcgctggagaccctgcttctcgccgccggcgccggcgccggcgggaccatccgtctgtccagcgatgtcggagtttatatattgcgggcaggcgttgctgcagaccttgtcacggcgatggcgagggcgagggcaagggcaaagcatcagcttcgcgacgaggagaggccgtggggggaatgctgcgacttggccgtatgcgtcaagacgtacccgctaacttgctcgtgcttcgatcgggttgagcgctgctccgacgcctgtaaggagtgcgtggaaacggaggactcgcgccacgtctgcgtcgacaggtaccgtggcgaccccgggcccaggtgccacgacgaggacgggaggagcggcggacccgctgacgacgacgctggtgggcaagcgacgccgacggcagtgatggcagatgacaagaaagcaggcggcggcgacgacgacaagaagaagaggccgtggaaatgctgcgacgtgcccatctgcaccaggtcctggcctccggtgtgccgctgcgcggacacggtggagcggtgcgccagcacctgccagcactgcgagcaggtggaggagggcggcccccgccgctaccgctgcctcgacacgcaccgcggcgacccggggccaaggtgcggcgacggcgaggacgatggtggggagtggtcgccgacgccgaggctcgcgaggggccaccgtttctagacccagctttcttgtacaaagttggcattataagaaagcattgcttatcaatttgttgcaacgaacaggtcactatcagtcaaaataaaatcattatttgccatcc

SEQ ID NO: 364 - protein, 248 aa, Zea mays
MAMGAASILLMMVSLETLLLAAGAGAGGTIRLSSDVGVYILRAGVAADLVTAMARARARAKHQLRDEERPWGECCDLAVCVKTYPLTCSCFDRVERCSDACKECVETEDSRHVCVDRYRGDPGPRCHDEDGRSGGPADDDAGGQATPTAVMADDKKAGGGDDDKKKRPWKCCDVPICTRSWPPVCRCADTVERCASTCQHCEQVEEGGPRRYRCLDTHRGDPGPRCGDGEDDGGEWSPTPRLARGHRF

SEQ ID NO: 365 - DNA, 972 bp, Zea mays
atgaaccacctgacgccggcgctccacggggcgatgcggccgccctcggcgcaggggcaggggctggcccggtacggctccgcgccgggctcgctcctggccgccatcgccgactccgtcacccgcggcgaccccgcgccgccgccgccgcccgtgagccggttctactccgccgagtcctcggggctcacctcctgcgactccagctgccgcaccgactgcggacgcccgcccctcgagcgggcgtacggcggctccggcgagatccgcgtgccgccgccgctgcagcagcagcagcaccacctgctggctccccccgcggcctccccgctgttccgccacagcagctcccccgccgggctgctctcccgcctcatgaccgacccgcacggaatggcggcgagcggaggagcgatggggagctacacgcaggcgggcagcgacgccgcgctgggccccggccacggccacggccacgcgcagctcagctcgcagtggagcttctccaggcaggacctgccgcagatctcggagatggggatgataccggccgacatcggggagagcatcgtgggcgccggcgggtgcaacagctccagcgacgccgcgcagtcctcctcctacctctccaggaccttctccgtcggctcctgggacgacaccaactccatcatgttctcgtctgccccctgcaagaagcccaaggtggaccccgccgccggcgccgacgacatggtcaccaacttcagcaccattgacccgcagttcggcctgtccaactcgtccctggagctgcccggcatggacgactacctgcagctgcagcaggactccgtcgcctgcagagtgcgtgcgaggcgtggctgcgcgactcacccacggagcattgccgagagggaaagaaggacgaggatcagcaagaggctgaagaagctgcaagacctcgtgcccaacatggacaaggtaagctga

SEQ ID NO: 366 - protein, 323 aa, Zea mays
MNHLTPALHGAMRPPSAQGQGLARYGSAPGSLLAAIADSVTRGDPAPPPPPVSRFYSAESSGLTSCDSSCRTDCGRPPLERAYGGSGEIRVPPPLQQQQHHLLAPPAASPLFRHSSSPAGLLSRLMTDPHGMAASGGAMGSYTQAGSDAALGPGHGHGHAQLSSQWSFSRQDLPQISEMGMIPADIGESIVGAGGCNSSSDAAQSSSYLSRTFSVGSWDDTNSIMFSSAPCKKPKVDPAAGADDMVTNFSTIDPQFGLSNSSLELPGMDDYLQLQQDSVACRVRARRGCATHPRSIAERERRTRISKRLKKLQDLVPNMDKVS

SEQ ID NO: 367 - DNA, 2855 bp, Zea mays
cggccagtcttaagctcgggccccaaataatgattttattttgactgatagtgacctgttcgttgcaacaaattgatgagcaatgcttttttataatgccaactttgtacaaaaaagcaggcttaaacaatgtcgtctgcgccggtggcgggggcggcgttcgagcggtaccagcagcgcggaggtggcggccccgcggcggccaacggcaacacggttttcaagagtgggcctcttttcatatcatccaaagggattggatggaaatcatggaagaaacgttggttcatcctcacaagaacatcattggttttcttcaagagtgatcctagtaccttgccccagagaggtggtgaagtgaatgttactctaggagggattgatttgaacaattctgggagtgtggtagtcagagaagacaagaagttattgactgtacttttcccagatggccgtgatggtcgtgcattcactcttaaggcagaaacttctgaagacttgtttgagtggaaaacagcattggaagaagctcttgcacaagctccaaatgcagctcttgtgatgggacataatgggatatttcgtaatgacacagctgacacatatgaaggagctattccaaattggagagagaagagaccgatcaagtcattggtgacaggcaggccaattctgcttgcacttgaggatattgatggcagcccttcttttttagaaaaagccctgcgctttcttgagaaacatggaataaaggtggaaggaattttgaggcagtctgcagatgtggaagaagttgacaggagattgcaagaatatgaacaaggaaggactgagttttcagcagatgaagacgctcatgttgtcggtgactgtgtaaagcatgttctccgagagctgccatcatcccccgtgcctgcttcttgctgtacagcattattggaagcgtttcgtctggagactaaggatgctaggataaatgctatgcgttcagctatatctgagacatttcctgagcccaatcggaggttgctgcagagaattttaaaaatgatgcacactgttgcatctcacacttctgaaaatcgaatgactgcatcggcagttgctgcctgcatggcgcctcttctgttgcgtccacttctggctggtgaatgtgagatggatgaggtatttgatatggatggtgacgattctgcgcagcttcttgctgcagcaaatgccgcaaacagtgctcaaggaattgtcgcaactctcttggaggaatatgagggcatttttcatgatgaacacctcagatgttccttgtcacctgaatctcaaattgaagatagtggtactgaagcatcaactgatgatggtaatttggaagccaagggcaatggatttcatgatgcagaaaatgatgtagatcaagaaatggatgatgacaatggcgtggaacgtatacttagtgggaaattgagtgagagcagtggatatgctggcagtgacctctatgactacaaggcagtcaatgctgaggagtcagatgctgaacgccctgtgaagatgttggaaggaaatttgaatttgagcaaagtacagaacagcctttcaactgaaaatggttcagcgaatgtggatagcttactaagcgaaaataatccttctaacccaacagttggtcacgagactttgtctatgggggagatcctttcttcttttgatcctggaatttctgtaccgacccatagtcctgaatattctgtagagagacagacaaacaaaactaatggatctcacccacatgtgaagcggagtaacttttgggggaggaataatgcaaggaagggccaaaactctgaatcagtcgattcatctggagaagaagagcttgctattcaaagactagagattgcgaagaatgatctgcaaaacagaattgcaaaagaggctagagggaatgcaattctacaggcgagtttggaaagaagaaaacaagcgctacatgaacgcagattggctttggaacaggatgtctccaggttgcaagaacaactgcaagctgaaagggatctgcgagctgcattggaggttggcttgagcatgtcttctggacagttttcaagtgctcgttcgatggacgtgaagacaaaggcagaacttgaggagattgctctcgctgaagctgatgttgcaaggttaaaacagaaggttgcagagcttcacctccaactcaatcaacaacgtcaacaccagtatggctctgtagtagatgcaaatgatcgtcatcaccgcctccctggtcatttctcacagcaaaactttgttcaacaaggatttgatatgaaccttgctttctgcaatcaagagaagcagagaaatgaggagagttcggtggagtcatcacaatggagaaacatcaagcagcatgtgctaccttatggttcttcgaggccactcacacgaaagctttcatttgatgcctcctcaagtgaatcaaggggcacagaaccctcaacaagtatgtcaacagagaacacctctgtgtccatcaacgtcccaaagctggcagagggcattgaatttgggaggcaaccaatggtcacatcctccactttggtagagctaacaactagactagatttcttcaaggagcgaaggtcgcaactgatggaacaacttcatagccttgatttgggacgtggatctgctccgcagggctttccattcaagccaccctctccttggaaccacccgaggtagacccagctttcttgtacaaagttggcattataagaaagcattgcttatcaatttgttgcaacgaacaggtcactatcagtcaaaataaaatcattatttgccatccagct

SEQ ID NO: 368 - protein, 871 aa, Zea mays
MSSAPVAGAAFERYQQRGGGGPAAANGNTVFKSGPLFISSKGIGWKSWKKRWFILTRTSLVFFKSDPSTLPQRGGEVNVTLGGIDLNNSGSVVVREDKKLLTVLFPDGRDGRAFTLKAETSEDLFEWKTALEEALAQAPNAALVMGHNGIFRNDTADTYEGAIPNWREKRPIKSLVTGRPILLALEDIDGSPSFLEKALRFLEKHGIKVEGILRQSADVEEVDRRLQEYEQGRTEFSADEDAHVVGDCVKHVLRELPSSPVPASCCTALLEAFRLETKDARINAMRSAISETFPEPNRRLLQRILKMMHTVASHTSENRMTASAVAACMAPLLLRPLLAGECEMDEVFDMDGDDSAQLLAAANAANSAQGIVATLLEEYEGIFHDEHLRCSLSPESQIEDSGTEASTDDGNLEAKGNGFHDAENDVDQEMDDDNGVERILSGKLSESSGYAGSDLYDYKAVNAEESDAERPVKMLEGNLNLSKVQNSLSTENGSANVDSLLSENNPSNPTVGHETLSMGEILSSFDPGISVPTHSPEYSVERQTNKTNGSHPHVKRSNFWGRNNARKGQNSESVDSSGEEELAIQRLEIAKNDLQNRIAKEARGNAILQASLERRKQALHERRLALEQDVSRLQEQLQAERDLRAALEVGLSMSSGQFSSARSMDVKTKAELEEIALAEADVARLKQKVAELHLQLNQQRQHQYGSVVDANDRHHRLPGHFSQQNFVQQGFDMNLAFCNQEKQRNEESSVESSQWRNIKQHVLPYGSSRPLTRKLSFDASSSESRGTEPSTSMSTENTSVSINVPKLAEGIEFGRQPMVTSSTLVELTTRLDFFKERRSQLMEQLHSLDLGRGSAPQGFPFKPPSPWNHPR

SEQ ID NO: 369 - DNA, 2001 bp, Zea mays
gccccaaataatgattttattttgactgatagtgacctgttcgttgcaacaaattgatgagcaatgcttttttataatgccaactttgtacaaaaaagcaggcttaaacaatgatgcgtttggtattcagggcagcggatgtcgcagaattactcgggatgatggtggaagatcacaaacgcattcaacctaatgcaagaacttatgcgttgttagtggaatgctttacaaagtactgtatggttaatgaatcaatcaggcattttcgtgctttacaaagaatccctggaggaacagaagtcctttacaatgaaggaaattgtggtgacccactttctctctatctacgatcattgtgcctcgatggaaggcctgttgagttgcttgaggctttagaagcaatggctaatgataaccaaagtattgcacctcgagcaatgatcttaaacagaaaatatcgcacattggtgagctcctggatagaaccattacaagaagaagctgatgttggttttgaaattgattatgtggccagatatattgaagaaggaggtcttacaggagagcgcaaacgttgggtgcctcgcagaggaaaaactcctttggatccagatgaatttggatttgcctattcaaatccgatagaaacatcctttaaacagcgatgctttgaggaattgaagttatatcatcgaaaactcctaattacgttgagaaatgaaggccctggtattttgggtgatgtctctgaagaagatgtacgcagagttattgaaaggctaaaaaagttagttgtagggccaaagaaaaatgttgttaagcccaaggcggcaagcaaaatggtagtatctgaactgaaaactgagcttgaagctcaaggattacctactgatggaactagacaagtgctttaccagagagttcaaaaggctaggagaatcaatcgctcacgtggtgtaccactttgggttcctcctgtagaagacgaggaagaggttgatgaagatttagatgagctgatctcacgaatcaagccagaagatgggaacacggagttctggaaacgccgttttctgggagaaactcgaaactatctttgtgaagaagatagtaaagaagacggtcaagatttagatgatgaattggaagatgatgatgacaacgatgatgatgaggatgacgatgaatctgtaaaagaagcagaagaagatgagatagatgatgaagaggttgttgagcaaacagaaaatcaagttggtgatgacactaaagataaaccagcaaaagaacccaaccatcatcttcaaatgataggggtacagttattgaaggatatagagaggacacctgtttcttcaaagaaattaaagcggatgccagagattgatgatgatgaagactggtttcctgaagatccaattgaagcctttaaggttatgcgggaggagaggatgttcgatgtatcagacatgtatactactgcagatgcctggggatggacgtgggaaagagaaataaagaacaagatgccacgtaagtggtcacaagaatgggaggttgagttggctatcaagataatgcacaaggtaatagaactgggtggtactccgacaattggtgattgtgccattatattgcgagctgctatgagagcaccactcccatctgcttttataccaatattgcaaacaacacacagtctaggttataagtttggaagcccactgtatgacgaagtagtcctattgtgccttgatctggaagaaattgacgcagccattgcagtagttgcggaaatggagacttgtggggttaaggtgccagatgaaaccttggacaaggtgcttgcgtccaaacggtctggaaattctgccctcccaccacctacggaggagtaaacccagctttcttgtacaaagttggcattataagaaagcattgcttatcaatttgttgcaacgaacaggtcactatcagtcaaaataaaatcattatttgcca

SEQ ID NO: 370 - protein, 595 aa, Zea mays
MMRLVFRAADVAELLGMMVEDHKRIQPNARTYALLVECFTKYCMVNESIRHFRALQRIPGGTEVLYNEGNCGDPLSLYLRSLCLDGRPVELLEALEAMANDNQSIAPRAMILNRKYRTLVSSWIEPLQEEADVGFEIDYVARYIEEGGLTGERKRWVPRRGKTPLDPDEFGFAYSNPIETSFKQRCFEELKLYHRKLLITLRNEGPGILGDVSEEDVRRVIERLKKLVVGPKKNVVKPKAASKMVVSELKTELEAQGLPTDGTRQVLYQRVQKARRINRSRGVPLWVPPVEDEEEVDEDLDELISRIKPEDGNTEFWKRRFLGETRNYLCEEDSKEDGQDLDDELEDDDDNDDDEDDDESVKEAEEDEIDDEEVVEQTENQVGDDTKDKPAKEPNHHLQMIGVQLLKDIERTPVSSKKLKRMPEIDDDEDWFPEDPIEAFKVMREERMFDVSDMYTTADAWGWTWEREIKNKMPRKWSQEWEVELAIKIMHKVIELGGTPTIGDCAIILRAAMRAPLPSAFIPILQTTHSLGYKFGSPLYDEVVLLCLDLEEIDAAIAVVAEMETCGVKVPDETLDKVLASKRSGNSALPPPTEE

SEQ ID NO: 371 - DNA, 931 bp, Zea mays
attttattttgactgatagtgacctgttcgttgcaacaaattgatgagcaatgcttttttataatgccaactttgtacaaaaaagcaggcttaaacaatgggaaagatgaaggcagtggcgtgcgtcgcctgctgggcggcattgtcactgatcaatgtcgtgatggccgtcgattacgtcgtcggcaacccggccggcggctgggacgggaggaccgactaccagtcttgggccgcagccgagacttttgctccgggagataccctaaccttcaagtacaactcataccacagcgtcatggaggtgaccaagagcgccttcgaggcgtgcaccacgaccgacccgatcttgtacgacaacagcggcagcaccaccgtcgcgctcaccatgccggggacgcgctacttcatctgcggcgcgccgggacactgcctgggcggcatgaagatgcaggtgcaagtcgccgaccgacccgcacccaccacacccagttcgccgccgccgccgccagcacacgcgaaacagaagcggcatgcaacggcaccatcaccgacgcctatgccgtgggctccagcgccgacaccatggtcgcccgcgccggcacccgcggccgcgccaccgagacgtgcagggcacaagaagaagcacaagaagaggtactgcccgcctgaaaccgtgcatgcgcccgcacgggcccccacccccacagtgcaggccgtcgaagcagactttccgttcgcggcgtttgctcctatgacagctccgccgccgccgccgccaacgtcgggagggcttgcatggcggcgagcaacgtgtggcgaggctactgcggccttagccgctctcgtctggttcatgctcctctgaacccagctttcttgtacaaagttggcattataagaaagcattgcttatcaatttgttgcaacg

SEQ ID NO: 372 - protein, 256 aa, Zea mays
MGKMKAVACVACWAALSLINVVMAVDYVVGNPAGGWDGRTDYQSWAAAETFAPGDTLTFKYNSYHSVMEVTKSAFEACTTTDPILYDNSGSTTVALTMPGTRYFICGAPGHCLGGMKMQVQVADRPAPTTPSSPPPPPAHAKQKRHATAPSPTPMPWAPAPTPWSPAPAPAAAPPRRAGHKKKHKKRYCPPETVHAPARAPTPTVQAVEADFPFAAFAPMTAPPPPPPTSGGLAWRRATCGEATAALAALVWFMLL

SEQ ID NO: 373 - DNA, 708 bp, Zea mays
cggccagtcttaagctcgggccccaaataatgattttattttgactgatagtgacctgttcgttgcaacaaattgatgagcaatgcttttttataatgccaactttgtacaaaaaagcaggcttaaacaatggctgctgcggcggcgatgatggtctccggaggacgggcggcgctggcggtggcgggcgtgctctgcgcggtggcggccatggcggcggcgcagcaggcgtcgaacgtgcgggcgacgtaccacctgtacaacccggcgcagaacgggtgggacctgaaccgcgtgagcgcgtactgcgccacgtgggacgccgacaagccgctgtcgtggcggcagaagcacggctggacggccttctgcgggcccgccgggcagaagggccaggccgcctgcggcaagtgcataagggtgaagaaccgtgcgacgggcgcgtccatcgtggcggggatcgtggaccagtgcagcaacggcggcctggacctggactacgagacggtgttcaagaagatcgacaccaacgggcagggctaccagatgggccacctcaacgtcgactaccagttcgtcgcctgctgaacccagctttcttgtacaaagttggcattataagaaagcattgcttatcaatttgttgcaacgaacaggtcactatcagtcaaaataaaatcattatttgccatccagctgatatcccct

SEQ ID NO: 374 - protein, 175 aa, Zea mays
MAAAAAMMVSGGRAALAVAGVLCAVAAMAAAQQASNVRATYHLYNPAQNGWDLNRVSAYCATWDADKPLSWRQKHGWTAFCGPAGQKGQAACGKCIRVCGSATFTFPPAGLSQAIVGLLQVKNRATGASIVARIVDQCSNGGLDLDYETVFKKIDTNGQGYQMGHLNVDYQFVAC

SEQ ID NO: 375 - DNA, 717 bp, Zea mays
taatgattttattttgactgatagtgacctgttcgttgcaacaaattgatgagcaatgcttttttataatgccaactttgtacaaaaaagcaggcttaaacaatggcgacgagggcatgggtggccgcggcggtggccttgaaccctcaactgctgcctctccgctcctgctcgcccacgaagtcggtctccccagcgcagcgctcggcgtcgatggggctccggctgcgcagcggccggccgtgcctggggaagttcgtgtgccgccgcgccaagaacgcgggatacgaggactacaagttcccggaccccatcccggagttcgccgagcaggagacgagcaagttcagggagcacatggcgtggcggctggagcagaagaaagaggactacttcggggaccatgtcgaggagatcgttgacgtctgcaccgagatcatggggacattcctggagaacgattaccgtggaccagggacgctcctggttcacccgttcctggacatgaagggcgagatcaaggagagggggctccccggcgcacctcaggcggcacgggcggcgatagcatgggccgaaaagaacgtggacaaggactggaaggcctggactggggaatactagacccagctttcttgtacaaagttggcattataagaaagcattgcttatcaatttgttgcaacgaacaggtcactatcagtcaaaataaaatca

SEQ ID NO: 376 - protein, 173 aa, Zea mays
MATRAWVAAAVALNPQLLPLRSCSPTKSVSPAQRSASMGLRLRSGRPCLGKFVCRRAKNAGYEDYKFPDPIPEFAEQETSKFREHMAWRLEQKKEDYFGDHVEEIVDVCTEIMGTFLENDYRGPGTLLVHPFLDMKGEIKERGLPGAPQAARAAIAWAEKNVDKDWKAWTGEY

SEQ ID NO: 377 - DNA, 2716 bp, Zea mays
ccaaataatgattttattttgactgatagtgacctgttcgttgcaacaaattgatgagcaatgcttttttataatgccaactttgtacaaaaaagcaggcttaaacaatgccgcgcaagcacgcgccggcgtttacgccggaggcagcctccgcctcttcgtcaggcggggctggccagccgcataacctccccgtgcttcaggcgaagatgaagcgtgacccggagggctacgaggaggagctccgccagctccaccgccacttcgagtcctcggtgttcctattccagcagcaggcggcgctggctacaacctcgtcctcgggaggcggcggggaggtggccaaggagctcggggacctcgccctgttccttgcccacgtcgcgcctttctacccggatgacctcgccgatttgcccgaccagattggtggcttgctcgacaccaacgcgcgtgggctgccgccggggctcaggtctcacctcgtgcaggcgcttgtattgctggtgaatcggaagattgtcgatcttgaggacacaatggagttattcatggagcttcaagttattggagatcgagctgtaaaaaagctagcattttcgcatattgtacacagtatcaggaggatgaaccagaagcacaagaatgaatcgacaaatcgtaaactgcaaaacgtcctttttaaattcttacaggctgaagaagagtcacgagcaaagagagcatttactatcctttgtgatcttcaccgtcggagggtctggtttgatgaacgcacaacaaatgcaatatgtgatgcttgtttccacccttcctctaggattatgatagctgctatttcatttcttcttggatatgaaaatgctccacaagaggatgatagcgacgcatcaagcagtgaagatgaagcagatcaaaacccacaaattcttctcagtaaacaggacgtttataaggcaaatcacaagggtacgtctgctagtaaaaaaaagaagaaagctaaattacagcgggtcattcgtagcatgaaaagacaacagcggaaatctgtcgaggaaactggttccagtttctattcacccctgacatatttaaaagatgcccagggttttgcggagaagcttttctctcggttgcagaaatgcaatgagcgatttgaggtaaggatgatgatgctaaaagtaatcgcgaggaccattgggctgcatcacttggttttgttgaacttctacccgtatcttcaaagatacgttcaacctcatcaacgagatgtgacgactctactcgctgcagcagttcaggcttgccatgatatggtacctccagatgctgttgaaccactgttcaagcagatagtaaatcagtttgtgcatgaccgttctcgtccagaggctattgctgttggcttaaatgttgtgagagagatctgcatgagaatacctttgatgatgaatgaggatctgctccaagacctcgttttatacaaaaagtcccatgagaaagctgtttccattgctgctcgttcgctgatcacattgttcagagagatctgtccttcattgttagtcaagaaagatcgtggccgtcctgtggatccaaaggctcggcccaaagcatttggagaagtcactgttgctagcaacgttcctggtgccgagttgctagatgaaaatatttcttcagaaggggaaagttcggacgatgagtctgatggttttcactccgatgatgagatggacttgacacctgcccctcctggaacagaagaaaatatggagggttcatctgttgcaaacaaacatgatgccgatggagataccaaagaggaagatgacgcatctgatgatgaagatggtacggatcaagatgactccaacagtgatagtgatgaactagacgatgactctgatgtggatgtgggtactgatatatctgatgaagacgaaggtgacgacggtgaactgaaagaaagcataaatggttcagaggatgaagctttagaccagaatgaagacagcgaagaggaagacaagtcaaaaggcagtggctctaaagcgcagaagaggaagttaaatgattatattggacagctaaattctgctgatgcaagccttcgagctctgaagaggttagcaactgccaagaaggctgaagaaccatctgatgaaactggtaaaattctatccgatgaagatttcaaacgcatcaaagaactcaaggctaagaaagaagcgaagctggctttggctcagcatggactaatcaagggtgtcgacacaaggtctgtaacctttaagatgccatcatctgaccagctcagcaggaagcgtgtcgatccacttgagcttgaggctcacgtcaggagaaagatgtccaaggaagaaaggttggcgttggtgaaagctggaagagaggatagaggtccttacatggcaagggcggccgtgaaacagaaaaagaccggtggactgagcaataagcagaagcagcacaagaagaggatgccactggcagcgactagagccaaggcagcacgttcccggcaggagaagaagcagcagcgcaagcgctccgggaatcagttcaggggccgcaaggcgtggaagtgaacccagctttcttgtacaaagttggcattataagaaagcattgcttatcaatttgttgcaacgaacaggtcactatcagtcaaaataaaatcattatttgccatcca

SEQ ID NO: 378 - protein, 833 aa, Zea mays
MPRKHAPAFTPEAASASSSGGAGQPHNLPVLQAKMKRDPEGYEEELRQLHRHFESSVFLFQQQAALATTSSSGGGGEVAKELGDLALFLAHVAPFYPDDLADLPDQIGGLLDTNARGLPPGLRSHLVQALVLLVNRKIVDLEDTMELFMELQVIGDRAVKKLAFSHIVHSIRRMNQKHKNESTNRKLQNVLFKFLQAEEESRAKRAFTILCDLHRRRVWFDERTTNAICDACFHPSSRIMIAAISFLLGYENAPQEDDSDASSSEDEADQNPQILLSKQDVYKANHKGTSASKKKKKAKLQRVIRSMKRQQRKSVEETGSSFYSPLTYLKDAQGFAEKLFSRLQKCNERFEVRMMMLKVIARTIGLHHLVLLNFYPYLQRYVQPHQRDVTTLLAAAVQACHDMVPPDAVEPLFKQIVNQFVHDRSRPEAIAVGLNVVREICMRIPLMMNEDLLQDLVLYKKSHEKAVSIAARSLITLFREICPSLLVKKDRGRPVDPKARPKAFGEVTVASNVPGAELLDENISSEGESSDDESDGFHSDDEMDLTPAPPGTEENMEGSSVANKHDADGDTKEEDDASDDEDGTDQDDSNSDSDELDDDSDVDVGTDISDEDEGDDGELKESINGSEDEALDQNEDSEEEDKSKGSGSKAQKRKLNDYIGQLNSADASLRALKRLATAKKAEEPSDETGKILSDEDFKRIKELKAKKEAKLALAQHGLIKGVDTRSVTFKMPSSDQLSRKRVDPLELEAHVRRKMSKEERLALVKAGREDRGPYMARAAVKQKKTGGLSNKQKQHKKRMPLAATRAKAARSRQEKKQQRKRSGNQFRGRKAWK

SEQ ID NO: 379 - DNA, 1412 bp, Zea mays
ttattttgactgatagtgacctgttcgttgcaacaaattgatgagcaatgcttttttataatgccaactttgtacaaaaaagcaggcttaaacaatgagcagcagtgaggctagcacgcaagaccatggcgtgccggcgctcgaggcgcaggatagcacggatgaccatggcgtgcccgcgctcgaggcgcccacgcccgaggctacggacaaggtactggccgccatggcgcgactggcgcgacgtcggaggctggagctaaggcggctggggcgcactgcacccgtgggggcggagggagaggtggcgatgcgggtgcgtccggtgtcgggcacctccgcggacacgtcccgcgagtcggcgaaggtggcgcccgagccgcatgaaggggcttctgcggtggcggggtggcccaagcccgtgtcgcacggcgcggtgtcggtgatcgggcggcggcgggagatggaggacgcggtcgccgtcgccgtgccgttcctggtggccgcggcgggggaggagggggacggcggcggggagaaggaggctgagatggagttcttcgcggtgtacgacgggcacggcgggtcacgggtggcggacgcgtgccgggagcggctgcacgtggtgctcgcggaggaggtggcgcgtctgcaccttgtgaagggcggcgacggcgcgcgctggagggaggtcatggaggcctgcttcgcccgcgtggacggtgaggtcgccgtcgtcgagggcgaggtgaacaacgccggccacacggtgggctccaccgccgtcgtggccgtcgtggggccccgtcacatcgtggtcgcgaactgcggcgactcccgcgccgtgctctcccgcggcggcgtccccgtgccgctgtcttccgaccacaagccagataggcctgatgagttggaaagggtagaatcagcgggcggcagggtcatcaactggaaggggtaccgtgtcctgggggtgcttgcgacgtcaaggtcaattggcgactactacatgaagccattcatatcagctgaaccagaggtgaccgttacggagcgtacgcacaaagacgagttcatcatcctggggagcgacgggctgtgggacgtcatgtccaacgaggtggcttgcaaggtggcgaggaactgcttgtgcgggcgcgcggcttccaagtaccctgaaaccgtccacgggagctcggccagcgatgccgccgcggtgctggtggagttcgccatggcgcggggcagcaccgacaacatcagcgtcgtggtggtggagctgaaacgtctgaagtggaagggtggtagacagaatggtaggatgtagacccagctttcttgtacaaagttggcattataagaaagcattgcttatcaatttgttgcaacgaacaggtcactatcagtcaaaa

SEQ ID NO: 380 - protein, 410 aa, Zea mays
MSSSEASTQDHGVPALEAQDSTDDHGVPALEAPTPEATDKVLAAMARLARRRRLELRRLGRTAPVGAEGEVAMRVRPVSGTSADTSRESAKVAPEPHEGASAVAGWPKPVSHGAVSVIGRRREMEDAVAVAVPFLVAAAGEEGDGGGEKEAEMEFFAVYDGHGGSRVADACRERLHVVLAEEVARLHLVKGGDGARWREVMEACFARVDGEVAVVEGEVNNAGHTVGSTAVVAVVGPRHIVVANCGDSRAVLSRGGVPVPLSSDHKPDRPDELERVESAGGRVINWKGYRVLGVLATSRSIGDYYMKPFISAEPEVTVTERTHKDEFIILGSDGLWDVMSNEVACKVARNCLCGRAASKYPETVHGSSASDAAAVLVEFAMARGSTDNISVVVVELKRLKWKGGRQNGRM

SEQ ID NO: 381 - DNA, 576 bp, Zea mays
atggcctcagcgaacaacgacgaccgcgaggcggcgggcatcctgcggctgctgatggggatggcggcggcggcggcgcccgcctcggcattgcctcggggcggcggcctgatgatggtgcagcacgtcatcctcgacgtcaacggggaactgttctcgggcggggtcggcggcggcggcgtgccgccggcgtcgaaggccgcgatcgccgcgctgaaggaggtgaaggccggggagggcgaggacgcgctgggcgagtgcgccatctgcctggacgcggtggagggcaccggcaaggagatgccgtgcgggcaccgcttccacgggcgctgcctggagcggtggctaggcgtgcacggcaactgccccgtctgccgccgcgagctgccagcgccggccaaggaggaggaggaggaggacagcgcggcgtcggcggagggcggcgaggaggagaggcggaggcccagggccgcggtcgtcgtcagctacctcgtgttcggaggcgggcgggcggaggtgcagcaggagccggagagggaggagccgtggaacattagaatagaggatgtggattag

SEQ ID NO: 382 - protein, 191 aa, Zea mays
MASANNDDREAAGILRLLMGMAAAAAPASALPRGGGLMMVQHVILDVNGELFSGGVGGGGVPPASKAAIAALKEVKAGEGEDALGECAICLDAVEGTGKEMPCGHRFHGRCLERWLGVHGNCPVCRRELPAPAKEEEEEDSAASAEGGEEERRRPRAAVVVSYLVFGGGRAEVQQEPEREEPWNIRIEDVD

SEQ ID NO: 383 - DNA, 1187 bp, Zea mays
caaataatgattttattttgactgatagtgacctgttcgttgcaacaaattgatgagcaatgcttttttataatgccaactttgtacaaaaaagcaggcttaaacaatggagcctcatcacgcaaacaagccaaggccaaagctcagcgcgacgaagcactccaagttcatctcctgcaagctctacatttccgaatcccgcaacgctacggccgtggacgcagtggagcgtgcgagcaagagtgacccccaggtggtcgtcgtcagccagttcggggaccatcactacaaccgtttccgctacacgcttgtctcctacatcgtcgtcgacggcggcggcggatcgtcggcggctggagaggcgatagcagtacatagcccgatcaggaaggtgttgctggcgatgatcgaggccgcgttctcaagcatagacctggaatcgcagtcgggagcgcatccgaggatcggcgtagtcgacgacctgtccttccaccccgtgggccaagcgacgatcgaggacgccgcttctctggctaggcaggtagcgtctgacattgcctgcatcgcagcagtcccagtgttcctgtacgcagcagcccacccggcggggaagtcggtgggcgcggtccggcgtgagctcggctactaccgcccaaactacaggggcaaccagtggtcaggcagcgtgctccccaacgtcctgccggtgaagcctgacgtcggtccggcccacgtcgtctcgcacaagagaggcgctacgacggtgggtgtcacgccttggatcgagaactacaatgtccccgtgctgtgtaaggacgtcgccaccgtcaggaggatcacccgtggtgtcactggacggagcggaggccttcccacggtgcaggctctcgcgctcttccatggagatgactgcaccgagattgcgtgcttgctggatccagatcatgccagcgcctatcaagttcagaccgtcgtggaacagattgcaggagaccagggacttgaggttgagcagggatactacactgacataaccaaggacgaagcgctcgataagtatctcaagattgcttgcgctgacgactgaacccagctttcttgtacaaagttggcattataagaaagcattgcttatcaatttgttgcaacgaacaggtcactatcagtcaaaataaaatcattatttg

SEQ ID NO: 384 - protein, 326 aa, Zea mays
MEPHHANKPRPKLSATKHSKFISCKLYISESRNATAVDAVERASKSDPQVVVVSQFGDHHYNRFRYTLVSYIVVDGGGGSSAAGEAIAVHSPIRKVLLAMIEAAFSSIDLESQSGAHPRIGVVDDLSFHPVGQATIEDAASLARQVASDIACIAAVPVFLYAAAHPAGKSVGAVRRELGYYRPNYRGNQWSGSVLPNVLPVKPDVGPAHVVSHKRGATTVGVTPWIENYNVPVLCKDVATVRRITRGVTGRSGGLPTVQALALFHGDDCTEIACLLDPDHASAYQVQTVVEQIAGDQGLEVEQGYYTDITKDEALDKYLKIACADD

SEQ ID NO: 385 - DNA, 1466 bp, Zea mays
caaataatgattttattttgactgatagtgacctgttcgttgcaacaaattgatgagcaatgcttttttataatgccaactttgtacaaaaaagcaggcttaaacaatggctgcaacgagtatgatcagggcgccgattgggccgaacccgaggctcgcgtgctacgccccggcgaggggcggcggcgtggtcaggtgctcgttgcagggcgcggtcgtcggcggccgggcggagtggcagagcagctgcgccatgctgtccagcaaggtggctgcgctcgggacgcactccatcaacggccacgtcgcgccggcgccggcgccggcgccagcggtgctggatttggtccccgtgagtagtatgaatggcgccgtggctaagaacctgccgcagccgcttcgcatcgcggacctgtcccctgcgccgatgcacgggttggagctacgcgtggcttaccagggcgtgcccggcgcgtacagcgagaaggcggccgggaaggcgtacccgggctgcgacgccatcccctgcgaccagttcgaggtggcgttccaggccgtggagctgtggattgccgaccgcgccgtgctccccgtggagaactcgctgggcggcagcatccaccgcaactacgacctgctgctccggcaccggctccacatcgtcggggaggtgcagctccccgtgcaccactgcctgctggcgctgcccggggtgcgcaaggagtgcctgacccgcgtgatcagccacccgcaggcgctggcgcagtgcgagcacacgctgacaggcatgggcctgaacgtggtccgcgaggccttcgacgacacggccggcgccgccgagcacgtggccgccaacggcctccgcgacacggccgccatcgcctcctcccgcgccgccgagctgtacgggatggaggtgctggcggacggcatccaggacgactccggcaacgtgacccgcttcgtgacgctggcccgggagcccatcgtgccgcgcacggaccgccccttcaagaccagcatcgtgttcgcgcacgacagggagggcacctccgtgctcttcaaggtgctctccgccttcgccttccgcggcatctcgctgaccaagatcgagagcaggccgcaccgccgcaggcccatccgcctcgtcgacgacggcaacatcggcaccgccaagcacttcgagtacatgttctacgtcgacttccaggcgtccctcgccgagccccgcgcgcagaacgcgctggccgaggtccaggagtacacgtccttcctccgggtgctcgggagctaccccatggacatgacgcccatgaccgccggctcttcctccaccgtttcctcgtccgatccctcgtcgtcatgaacccagctttcttgtacaaagttggcattataagaaagcattgcttatcaatttgttgcaacgaacaggtcactatcagtcaaaataaaatcattatttg

SEQ ID NO: 386 - protein, 419 aa, Zea mays
MAATSMIRAPIGPNPRLACYAPARGGGVVRCSLQGAVVGGRAEWQSSCAMLSSKVAALGTHSINGHVAPAPAPAPAVLDLVPVSSMNGAVAKNLPQPLRIADLSPAPMHGLELRVAYQGVPGAYSEKAAGKAYPGCDAIPCDQFEVAFQAVELWIADRAVLPVENSLGGSIHRNYDLLLRHRLHIVGEVQLPVHHCLLALPGVRKECLTRVISHPQALAQCEHTLTGMGLNVVREAFDDTAGAAEHVAANGLRDTAAIASSRAAELYGMEVLADGIQDDSGNVTRFVTLAREPIVPRTDRPFKTSIVFAHDREGTSVLFKVLSAFAFRGISLTKIESRPHRRRPIRLVDDGNIGTAKHFEYMFYVDFQASLAEPRAQNALAEVQEYTSFLRVLGSYPMDMTPMTAGSSSTVSSSDPSSS

SEQ ID NO: 387 - DNA, 611 bp, Zea mays
taagctcgggccccaaataatgattttattttgactgatagtgacctgttcgttgcaacaaattgatgagcaatgcttttttataatgccaactttgtacaaaaaagcaggcttaaacaatggctgctccgaagctcgcgacgctggcgctggccgtgctcctggcggcgaccgtggtggctcccccggccgcggtgcgcgcggcgatgtcgtgctccaccgtgtacagcacgctgatgccgtgcctgccgttcgtccagatgggcggggccatgccgccccagccgtgctgcggcggcatccgcagcctgctgcagcaggccaacaacacccccgaccgccgcaccatctgcggctgcctcaagaacgtcgccaacggcgccaacgggagcggcacctacatcagccgcgccgccgcgctgcccagcaagtgcggcgtcgccctgccgtacaagatcagcaccaacgttaactgcaacacgattaattaaacccagctttcttgtacaaagttggcattataagaaagcattgcttatcaatttgttgcaacgaacaggtcactatcagtcaaaataaaatcattatttgccatccagctgatatcccct

SEQ ID NO: 388 - protein, 123 aa, Zea mays
MAAPKLATLALAVLLAATVVAPPAAVRAAMSCSTVYSTLMPCLPFVQMGGAMPPQPCCGGIRSLLQQANNTPDRRTICGCLKNVANGANGSGTYISRAAALPSKCGVALPYKISTNVNCNTIN

SEQ ID NO: 389 - DNA, 1097 bp, Zea mays
tgattttattttgactgatagtgacctgttcgttgcaacaaattgatgagcaatgcttttttataatgccaactttgtacaaaaaagcaggcttaaacaatggggaggcaaccgtgctgcgacaaggtggggctgaagaagggcccgtggtcggcggaggaggacgagaagctcgtcaccttcctcctcaccaacggccagtgctgctggcgcgccgtgcccaagcttgccgggctactgcggtgcggaaagagctgcaggcttcggtggaccaactacctgcgcccggacctcaagcgcgggctgctgtcgtcggaggaggagacgacggtgatcgacctgcacgcgcagctgggcaaccggtggtccaagatcgcgtcgcacctgccgggacgcacggacaacgagatcaagaaccactggaacacgcacatcaagaagaagctgaggaagatgggcatcgaccctgccacccacaagcccctccacccacagccagcagctcctcctccgactcagcaggagcaggacacgggcgggtcgcccgaggaggagggggagaaggccgacgcggtcatgatggcagcagctacgccgattatcgggcacgagacggcgccgttctttaccgacgaggaggagatgctggcgcacctccttgacgacatcgacgacttcccacccgcggcttattctcccgacgactcttcttcgccctcctcctcctcctccgcgtcccggtcgtctcactcggcctccgtcgtcacagcgccgtcgtcgagcggagctggtggaagcagcgtcgccgacggcgagcggccgctgcagatggtggagtggcctgagtccatgtggctggacgacgacgtggtgcccggcctggccacgacgccgtgggagttcgaggacgacaaccccttcctcgcctaccagaggaacaacgctctgttcgatcaccagctggaggcatggaacaacgacggcagggtcgagctgttctgaacccagctttcttgtacaaagttggcattataagaaagcattgcttatcaatttgttgcaacgaacaggtcactatcagtcaaaataaaatcatt

SEQ ID NO: 390 - protein, 300 aa, Zea mays
MGRQPCCDKVGLKKGPWSAEEDEKLVTFLLTNGQCCWRAVPKLAGLLRCGKSCRLRWTNYLRPDLKRGLLSSEEETTVIDLHAQLGNRWSKIASHLPGRTDNEIKNHWNTHIKKKLRKMGIDPATHKPLHPQPAAPPPTQQEQDTGGSPEEEGEKADAVMMAAATPIIGHETAPFFTDEEEMLAHLLDDIDDFPPAAYSPDDSSSPSSSSSASRSSHSASVVTAPSSSGAGGSSVADGERPLQMVEWPESMWLDDDVVPGLATTPWEFEDDNPFLAYQRNNALFDHQLEAWNNDGRVELF

SEQ ID NO: 391 - DNA, 831 bp, Zea mays
tgagcaatgcttttttataatgccaactttgtacaaaaaagcaggcttaaacaatgtcgttcgtgcagctctctggtgctggagtcgctgcagtggccttcacgaacaagagcctagtctctcggcacgcagcgctacgggtctgctcgtcgaggcgctcgatccgtagcctggtcgttaaggctgcaactgtcgtcaccccaaagtacacttcactgaagcctctgggagatagggtgcttgtgaagcttggtgccgcagaggagaagacagttggtggcattttgcttccatctactgcccagactaaaccacaaggaggtgaggttgttgctgttggagcaggaaggaccatcggggacaagaaaatagctgtggatatagagactggagcacaagtagtatactcaaagtatgctgggactgaggttgaattcaatgactcaaagcatcttattctcaaagaagacgatatcattggtattcttgagacagatgatgtgaaggacatgaagcctctcaatgaccgtgttctcatcaaggttgcagaagccgaagacaaaactcctgggggccttatcctcactgaaacaactaaagagaagccgtccataggaacggttgtagctgttggcccgggtcctctggacgaggaaggcaagagacagccactgtcagtgtcggcgggcagcacagtgctgtactccaagtatgcagggagtgagttcaagggcgcggatggcacggcctacattgtgttgagagcgtcggatgtgatggctgtcctgtcttgaacccagctttcttgtacaaagttggcattataagaaa

SEQ ID NO: 392 - protein, 246 aa, Zea mays
MSFVQLSGAGVAAVAFTNKSLVSRHAALRVCSSRRSIRSLVVKAATVVTPKYTSLKPLGDRVLVKLGAAEEKTVGGILLPSTAQTKPQGGEVVAVGAGRTIGDKKIAVDIETGAQVVYSKYAGTEVEFNDSKHLILKEDDIIGILETDDVKDMKPLNDRVLIKVAEAEDKTPGGLILTETTKEKPSIGTVVAVGPGPLDEEGKRQPLSVSAGSTVLYSKYAGSEFKGADGTAYIVLRASDVMAVLS

SEQ ID NO: 393 - DNA, 886 bp, Zea mays
gactgatagtgacctgttcgttgcaacaaattgatgagcaatgcttttttataatgccaactttgtacaaaaaagcaggcttaaacaatggtcagtgatctcctcctcctccttttcctctctctctctctctctttctctcactcccgcgcgtacctgttgggaaaaaaaagtacctactacagcttggctacagttttgataaactacacacacatggacagcagtcagcagcagcagaaacaagacgacgtcgacgtcgacgtaatggaggtcccggaggtccacggcgacctcctcatggagctcctggacgcgtccctcgccgccgagaacgctgcccaccaccaccaccaccaccaccaccaccaacagcttggtctagcgcccgacggcgacggcgacggcgactgttggatcgacgacaaccaagagaactacgacaatatgcacgcgcaccagggctgcgaggactgccgcggcctcctcgacggcatactgtccgacttcgacgactacgacgggggcccatcacggccgaggtccccgccggcgccgtaccgcgtcgtcttcggccacgacgacgacaccctgctggagctggagtgggcggaggaggccgccatggacccgttcgccaccagcgagtccgcggggggctggtacatggacggcctggtcatggccatggcgtgggacgagcagcaggacggcggcggcttcccgttcgagccctgctacggatacgaaggggaggcgggcgccgccgggcagctctatgatgccagcccgctgtgggagtgaacccagctttcttgtacaaagttggcattataagaaagcattgcttatcaatttgttgcaacgaacaggtcactatcagtca

SEQ ID NO: 394 - protein, 238 aa, Zea mays
MVSDLLLLLFLSLSLSFSHSRAYLLGKKSTYYSLATVLINYTHMDSSQQQQKQDDVDVDVMEVPEVHGDLLMELLDASLAAENAAHHHHHHHHHQQLGLAPDGDGDGDCWIDDNQENYDNMHAHQGCEDCRGLLDGILSDFDDYDGGPSRPRSPPAPYRVVFGHDDDTLLELEWAEEAAMDPFATSESAGGWYMDGLVMAMAWDEQQDGGGFPFEPCYGYEGEAGAAGQLYDASPLWE

SEQ ID NO: 395 - DNA, 1031 bp, Zea mays
tgcttttttataatgccaactttgtacaaaaaagcaggcttaaacaatgccgccccataagatcgagacggggcaccaagatgtggtgcatgatgtcgccatggattactatggcaagcgcctagctacatcctcctctgataatacaataaagatcattggcgtaagtggaacctcacaccagcagcttgcaactttgagtggacaccagggcccagtatggcaagtcgcatgggctcatcccaagtttggttccatgcttgcatcctgcagctacgacggccgagtgatcatctggaaggaaggaagcaagcctgatgaatgggcactggtacacacctttgctgagcacaagtcctccgtgaattccatcgcgtgggcgcctcatgagctgggtctatgcttggcttgtggttcatcagatgggaacatttcagtcttcactgctcgttctgatggaggttgggataccacgcgtattgatcaggcgcatccggttggtgtgacctcagtttcttgggctcctgcaatggcaccgggagctctaatcagcgcggggtcttctggtcagtttgagtatgttcagaaactcgcttccggtggctgtgacaacacggtgaaggtgtggaagctcaacaacggcagttggcggatggactgtttccccgccctacagatgcacaaggactgggtgagagacgtcgcgtgggcgccaaacctgggccttccaaagtccaccatcgccagcgcctctcaggatggaacagttgttatctggacagcagcaaaagaaggcgagcagtgggaaggccggttgctgtatgatttcaggacccctgtgtggaggctgtcgtggtcactgactgggaatatactggcggtgtctgacggcaacaacaatgtgaccctgtggaaggaagctgtggacggcgaatggcagcaagtgacgactgttgagccatagacccagctttcttgtacaaagttggcattataagaaagcattgcttatcaatttgttgcaacgaaca

SEQ ID NO: 396 - protein, 305 aa, Zea mays
MPPHKIETGHQDVVHDVAMDYYGKRLATSSSDNTIKIIGVSGTSHQQLATLSGHQGPVWQVAWAHPKFGSMLASCSYDGRVIIWKEGSKPDEWALVHTFAEHKSSVNSIAWAPHELGLCLACGSSDGNISVFTARSDGGWDTTRIDQAHPVGVTSVSWAPAMAPGALISAGSSGQFEYVQKLASGGCDNTVKVWKLNNGSWRMDCFPALQMHKDWVRDVAWAPNLGLPKSTIASASQDGTVVIWTAAKEGEQWEGRLLYDFRTPVWRLSWSLTGNILAVSDGNNNVTLWKEAVDGEWQQVTTVEP

SEQ ID NO: 397 - DNA, 669 bp, Zea mays
gtgacctggttcgttgcaacaaattgatgagcaatgcttttttataatgccaactttgtacaaaaaagcaggcttaaacaatgtccccttctgccatcttcgtcttcctcctcgtctctgcggtgcatatgctggagtgcatcctcgacctcaagaggaggaggggatccatttctgatgatcagctcagactgcgtgtagagatcacgcaacttctcaaggaggccagtgctttgtcaacgccctcgacgtttgcgcaagccgcaaaactgaagcggttggctggtgctaaagagaaggagctggcaaaaatgcaagatgtggacattagagggaaacagtctttatatgaaaaataccgaaaagttctgctggccgcaaaggttgtagtctatggtgtgctcgttctgtggttttggagtactccagtaactactgtccctaagcaccttctccagcccttcgggaggatgttttcctggagaggtgtagatgcttctacaggccgtgttgtggttggaattctcccatggctatttctgacctctcgtgtcagcaagctactgagcgagaaactcgcgcccatatttctgcatccttagacccagctttcttgtacaaagttggcattataagaaagcattgcttatcaatttgttgcaacgaaca

SEQ ID NO: 398 - protein, 173 aa, Zea mays
MSPSAIFVFLLVSAVHMLECILDLKRRRGSISDDQLRLRVEITQLLKEASALSTPSTFAQAAKLKRLAGAKEKELAKMQDVDIRGKQSLYEKYRKVLLAAKVVVYGVLVLWFWSTPVTTVPKHLLQPFGRMFSWRGVDASTGRVVVGILPWLFLTSRVSKLLSEKLAPIFLHP

SEQ ID NO: 399 - DNA, 805 bp, Zea mays
atgattttattttgactgatagtgacctgttcgttgcaacaaattgatgagcaatgcttttttataatgccaactttgtacaaaaaagcaggcttaaacaatggacggtgtcgttgtcaggagggtcatcccttcggataacagttgcctcttcaacgctgtgggctacgtgatggagcacaaccgaaataaggcttctgagctcagacaggtcatagcagcaacagtcgctggtgatcctgagaaattcaatgaagtgtttcttggcaaaccaaatgaagcgtattgtgcttggattttggatcctgaaaagtggggaggagccattgagctctctattctatctgaatactacgggcgtgaaatcgcagcatatgacattcagaccacccgctgtgatctctatggtcaggagaagaattacagtgaaagggccatgctcatttatgatggtttgcattatgatgctctcgctatgtctccggctgaaggtgcacctgaagaatttgaccagacaatcttccccgttaatcatgaccgttccattggtccagcagaaggccttgccctcaacttagtgagggaggcgcaaaggaagaggagctacactgacactgcaaacttcactctgcgctgcggggtgtgccagatcggcgtcatcggtcaacaggaggctgtggaacatgcgcaagccactggccacgtcaacttccaagaatacaaatgaacccagctttcttgtacaaagttggcattataagaaagcattgcttatcaatttgttgcaacgaacaggtcactatca

SEQ ID NO: 400 - protein, 208 aa, Zea mays
MDGVVVRRVIPSDNSCLFNAVGYVMEHNRNKASELRQVIAATVAGDPEKFNEVFLGKPNEAYCAWILDPEKWGGAIELSILSEYYGREIAAYDIQTTRCDLYGQEKNYSERAMLIYDGLHYDALAMSPAEGAPEEFDQTIFPVNHDRSIGPAEGLALNLVREAQRKRSYTDTANFTLRCGVCQIGVIGQQEAVEHAQATGHVNFQEYK

SEQ ID NO: 401 - DNA, 543 bp, Zea mays
gcttttttataatgccaactttgtacaaaaaagcaggcttaaacaatggcacagcgtgtgatgtgcttgcttcggcgctccatagggtttacagtgccaccagcacagagagccctgagtacaactgccacaccagcagcggagggtgcagcggtggccgaggcgacggcgaaggaggcaaagaagaggaagaagaaaaatctgttcgacgtggtgcagttcctgccagggtggggcgtcggatacaaggtcgccaagacgacctggcgcgatgtctcctaccagatcaccaagatcaacctgtacaaggatggtcggcatggaaaggcatgggggtttcggtacaaggcaggtgtgcaagctgcagacgccccaactaggatcagcggggttaacaagcgtgggtggaagtacataaaagaatcacagaagaaactacacgatgcccccaaagtagacgtagcgattgctggctagacccagctttcttgtacaaagttggcattataagaaagcattgcttatcaatttgttgcaacgaac

SEQ ID NO: 402 - protein, 143 aa, Zea mays
MAQRVMCLLRRSIGFTVPPAQRALSTTATPAAEGAAVAEATAKEAKKRKKKNLFDVVQFLPGWGVGYKVAKTTWRDVSYQITKINLYKDGRHGKAWGFRYKAGVQAADAPTRISGVNKRGWKYIKESQKKLHDAPKVDVAIAG

SEQ ID NO: 403 - DNA, 1413 bp, Zea mays
gccccaaataatgattttattttgactgatagtgacctgttcgttgcaacaaattgatgagcaatgcttttttataatgccaactttgtacaaaaaagcaggcttaaacaatggccaccgccgtttccacccccgcggacctgtcgcccacgcctgccccgagacggcggggccggccgccgaagaaccccgccccagccgaggccccaggcagcccggcggaccaagcggaggtgattggggactacgagcgcgagagggacgcgaggatccgggagaacatggagcggatgcagaagctcggcatcctcgacctcgcgcacaccctcagccactgcgccgccgcctcgggtcggggtaccggcagtgggcggtggcgccggaagcccatggagccggggtccgctggcggggccagggtgaagcccgcgtcgccggcgccctcgcggagatcgctcaggttgaaggacgtggaacctgttacctatcgtgaaattgagccaaagaaagagaaacgctctgaaggtggcaaaactgtgttaatggaggtgggagccaaggaagaaatatacactgaagagcatgacaagcttttgggtacatgcaacactccttggactctctttgttgatggttatggcaaagatggaaaacgcatttatgatcaagtgaggggtcaaacctgtcatcagtgccgtcagaagactcttggtcatcatacaagctgctgtaaatgccagattgtccaaggacagttctgtggagactgtttgtacatgaggtatggtgaaaatgtgttagaggttaagaagaatcctaactggatatgtccagtttgccgtggcatctgtaattgcagtctatgcagaactaagaaaggatggttccctactgggtctgcgtataggaaggcgatcggacttgggtacaaatctgtggcacactttctaattgcaacacatcgagcatcatcagccaattcaagctcagtcgacaataacaagctgccgtttgctaaatctgaaacctcgtgcatttctgaccatgccaatgagagcccagaggatggagaaacgaccagcaaagctaagcagaacaaagcaactcgccgccgagtgaggaagagttctgatggcgacaacgatagcagaagtgggtccgtggtgacatctgactgccaggatgatcaagccaacaaggatgctgggtgtgtgactccgtcgtctaagccagcgtcaacgaagaggaagtacgttgaacgaagccctgactgcatcgcaagcaggctgcggtctcggctcaatatgccatgaacccagctttcttgtacaaagttggcattataagaaagcattgcttatcaatttgttgcaacgaacaggtcactatcagtcaaaataaaatcattatttg

SEQ ID NO: 404 - protein, 400 aa, Zea mays
MATAVSTPADLSPTPAPRRRGRPPKNPAPAEAPGSPADQAEVIGDYERERDARIRENMERMQKLGILDLAHTLSHCAAASGRGTGSGRWRRKPMEPGSAGGARVKPASPAPSRRSLRLKDVEPVTYREIEPKKEKRSEGGKTVLMEVGAKEEIYTEEHDKLLGTCNTPWTLFVDGYGKDGKRIYDQVRGQTCHQCRQKTLGHHTSCCKCQIVQGQFCGDCLYMRYGENVLEVKKNPNWICPVCRGICNCSLCRTKKGWFPTGSAYRKAIGLGYKSVAHFLIATHRASSANSSSVDNNKLPFAKSETSCISDHANESPEDGETTSKAKQNKATRRRVRKSSDGDNDSRSGSVVTSDCQDDQANKDAGCVTPSSKPASTKRKYVERSPDCIASRLRSRLNMP

SEQ ID NO: 405 - DNA, 1630 bp, Zea mays
gatagtgacctgttcgttgcaacaaattgatgagcaatgcttttttataatgccaactttgtacaaaaaagcaggcttaaacaatggacatggacatgagctcagcttatccccaccattggctctccttctccctctccaacaactaccaccatggcctactcgaagccttctctaactcctccggtactcctcttggagacgagcagggcgcagtggaggagtccccgaggacggtggaggacttcctcggcggcgtcggtggcgccggcgccccgccgcagccggcggcggctgcagatcaggatcaccagcttgtgtgcggcgagctgggcagcatcacagccaggttcttgcgccactacccggcggcgccagctgggacgacggtggagaaccccggcgcggtgaccgtggcggccatgtcgtcgacggacgtggccggggcggagtccgaccaggcgaggcggcccgccgagacgttcggccagcgcacatccatctaccgtggcgtcaccaggcaccggtggacggggagatatgaggcgcacctgtgggacaacagctgccgccgggagggccaaagccgcaaaggacggcaagtctacctaggaggctatgacaaggaggagaaggcggctagagcttacgacctcgccgcgctcaagtactgggggcctacaaccacgaccaacttcccggtgtccaactacgagaaggagctggaggagatgaagtccatgacgcggcaggagttcatcgcgtcgttgcgcaggaagagcagcggcttctcacgaggcgcctccatctacagaggagtcacaaggcatcatcagcacggccggtggcaggcgaggatcggcagggtggccggaaacaaggacctgtacttgggcactttcagtactcaggaagaggcggcggaggcgtacgacatcgctgcgatcaagttccgcgggctcaacgccgtcaccaactttgacatgagccgctacgacgtggagagcatcctcagcagcgacctccccgtcgggggcggagctagcggtcgcgcccccgccaagttcccgttggactcgctgcagccggggagcgctgccgccatgatgctcgccggggctgctgccgcttcgcaggccaccatgccgccgtccgagaaggactactggtctctgctcgccctgcactaccagcagcagcaggagcaggagcggcagttcccggcttctgcttacgaggcttacggctccggcggcgtgaacgtggacttcacgatgggcaccagtagcggcaacaacaacaacaacaccggcagcggcgtcatgtggggcgccaccactggtgcagtagtagtgggacagcaagacagcagcggcaagcagggcaacggctatgccagcaacattccttatgctgctgctgctatggtttctggatctgctggctacgagggctccaccggcgacaatggaacctgggttactacgactaccagcagcaacaccggcacggctccccactactacaactatctcttcgggatggagtagaccccgctttcttgtacaaagttggcattataagaaagcattgcttatcaatttgttgcaacgaacaggtcactatcagt

SEQ ID NO: 406 - protein, 488 aa, Zea mays
MDMDMSSAYPHHWLSFSLSNNYHHGLLEAFSNSSGTPLGDEQGAVEESPRTVEDFLGGVGGAGAPPQPAAAADQDHQLVCGELGSITARFLRHYPAAPAGTTVENPGAVTVAAMSSTDVAGAESDQARRPAETFGQRTSIYRGVTRHRWTGRYEAHLWDNSCRREGQSRKGRQVYLGGYDKEEKAARAYDLAALKYWGPTTTTNFPVSNYEKELEEMKSMTRQEFIASLRRKSSGFSRGASIYRGVTRHHQHGRWQARIGRVAGNKDLYLGTFSTQEEAAEAYDIAAIKFRGLNAVTNFDMSRYDVESILSSDLPVGGGASGRAPAKFPLDSLQPGSAAAMMLAGAAAASQATMPPSEKDYWSLLALHYQQQQEQERQFPASAYEAYGSGGVNVDFTMGTSSGNNNNNTGSGVMWGATTGAVVVGQQDSSGKQGNGYASNIPYAAAAMVSGSAGYEGSTGDNGTWVTTTTSSNTGTAPHYYNYLFGME

SEQ ID NO: 407 - DNA, 1650 bp, Zea mays
atggaatcgcgccgcctcttcctcactcgccgcctctccatctcctccggcgcccagtccagcgccgctttcatcgccgacgaaatctatgccctcctcaccacacgatctttccgggcttccgttaaccgcacggaactgttcatacgctccaaatccgtcacagcctccggcgtcgccgagatgtaccgctcggtggccgttgcaggcccacctgggcagcccctttacctcggccgcgcggcctccgtgctggtcgaggcatccgcgcgcgcggccctccccgacggcgcgctgcggctgctggacctcctcatactcacgcccaaggcgccgctgccgtcgggcgcctcctgcggccacctcatggcgaagctcttctcactcgggcgccacgcggatgcgcgccgcgtgttcgagaccctcggcgatcgccagcgccgcgatgcggtcaccacggtttggagagtcgggagagcggctgacgccgtcaaggtgttcggcgaaacggcggccacgaccacggcgccaaaatattccagtgaccggtatgttaccatgaatatgatgactgactgcctgatgaagggagatctggaggctgcttggaagttgcggacccagatggtggaggcgggcatgaaactacagaagcaccaccagaaaatgctgcaaatgctggaaaaagtcctggtgtgcccagacaacaacaagcggaacgtgcttatcgaagtctgcgtcaaggcaggcggcatggacgaggccgtccattggctccggcagatgggctacgatggcatggaacctcccagtgctcactcctacaacttggtgatcgccgggctctggaaggccggcaggggtgacgacgctgtcaaggtgttcggcgagatggcagacatgctcgtggcgccgaatcatttcacatatactgtcatgatcaatggccacttgaagagactgagcagtgttctgtcctcgaggaagaacgagaatggagatctggaggctgcgctcgccctgctggatcagatggtgcgggatggcttcaagccacacgaatacacctgccatttgctgatggcagaacactgcttagctgaatggctgggagacgttacagctttacataagatcgctcatggcagcctgcttgagttcctatctagaaccaacgaagataagttactggccatcattgaggaatctgcgaagaacggtgctgctgcagcgggtaatgtttgtactacctttgtcgaggagctttgcaggattcagaaagtttcactcgcagagaaggtgctgcggacatttgcggaggcagggttggtcccgacgacagagatgtacaacattgtcattgacgggtattgcaagaccagggacctccaaggggcgttcttgttgtgtcgccagatggaatcacatgatcagcttgtacctgatgaagccacctacaagtctctgctgctggccgtgcgcaacgacacaacaagcatcatctactgggaggacgtggttgagttgtttgagaagaatggaattagtactgatgcgctgaactccggcagtcctgctgcatacggattcaagtataggtacagtctagtaactagaaagtttaaggaattggcgagcaagctattttag

SEQ ID NO: 408 - protein, 549 aa, Zea mays
MESRRLFLTRRLSISSGAQSSAAFIADEIYALLTTRSFRASVNRTELFIRSKSVTASGVAEMYRSVAVAGPPGQPLYLGRAASVLVEASARAALPDGALRLLDLLILTPKAPLPSGASCGHLMAKLFSLGRHADARRVFETLGDRQRRDAVTTVWRVGRAADAVKVFGETAATTTAPKYSSDRYVTMNMMTDCLMKGDLEAAWKLRTQMVEAGMKLQKHHQKMLQMLEKVLVCPDNNKRNVLIEVCVKAGGMDEAVHWLRQMGYDGMEPPSAHSYNLVIAGLWKAGRGDDAVKVFGEMADMLVAPNHFTYTVMINGHLKRLSSVLSSRKNENGDLEAALALLDQMVRDGFKPHEYTCHLLMAEHCLAEWLGDVTALHKIAHGSLLEFLSRTNEDKLLAIIEESAKNGAAAAGNVCTTFVEELCRIQKVSLAEKVLRTFAEAGLVPTTEMYNIVIDGYCKTRDLQGAFLLCRQMESHDQLVPDEATYKSLLLAVRNDTTSIIYWEDVVELFEKNGISTDALNSGSPAAYGFKYRYSLVTRKFKELASKLF

SEQ ID NO: 409 - DNA, 1629 bp, Zea mays
tttattttgactgatagtgacctgttcgttgcaacaaattgatgagcaatgcttttttataatgccaactttgtacaaaaaagcaggcttaaacaatggttgaggtgatgatggtacccagctcccacggctgcggcgagggtggtggtgtaggaagcgacgggaaggcggaggacgggcagcagcaggggcagggacaggggcaggtgctggcgctgctgctggccgcgctccgcaagtcggtggtgctaccgtgccagatggcggacgccgacgacccatcgggggcggcgtgggggatggagatcggctggcccacagacgtccgccacgtcgcgcacgtcaccttcgaccgcctccacggcttcctcggcctccccgtcgagttcgagctcgagatccccggccaggtccccagcgccagcgccagcgtgttcggggtatcaccggagtcgatgcagtgtggctacgatgacaaggggaactcggtgcccaagatccttctgctcatgcaagagaggctgtacgcgcaggatggactcaaggcagaggggatcttccggatcaccccggaaaacagccaggaggagcatgtcagggagcagctcaacagcggcatcgtgcctgacgacatcgatgtgcactgccttgctagtttgatcaaggcctggttcagagaactccctgaaggcgtgcttgacaggctttcacctgagcaagtccttcactgcaacacagaggagcaatgcattgagctcgtgaagcttcttccagcaacccaggctgcacttcttcattgggtcgttgagctcatggctgatgttgttgaggaagaggagtcgaataagatgaatgcaagaaatgttgccatggtttttgcaccaaatatgacacagatgtccgatcctctgacagcactgatgcatgctgttcaagtgatgaacttgctcaaaaccttaattctcaaaacacttcgggaacgcgaggatgatgatgcaggggcctattcttcattctcatcttcgttatcttcatctggtgaacttgacgaggatgatggtcatgaccaacaggatgatgaaaatgatagtggcagtgagaaaaactataatggcagtgctaacggaagaccaagagatattgacaaggccactgcactaagagtagacagtgagcagctaattggtgtgtccaggaggcacacatcaaccgatttccatctgccttacattagatacagtaacgacagtgaagacgtatcactggatgatattgaggaatgtttcttaagaaggctagaatggaaatcagtgagggaaagtgttgatgaaggcgacagtagaaactctcctccctcagagaaagaggcagagtggcttagctcctctgagaacgtaacggaagctagcaacgcaattggtgaagaaagaggcagaacaagcaatgccactgatgtaagtttcaatgagctgaggcaaacggaaaccagaattgaaatgacgagtgctgcaaaaggggagcttattctttgctcataaacccagctttcttgtacaaagttggcattataagaaagcattgcttatcaatttgttgcaacgaacaggtcactatcagtcaaaataaaat

SEQ ID NO: 410 - protein, 480 aa, Zea mays
MVEVMMVPSSHGCGEGGGVGSDGKAEDGQQQGQGQGQVLALLLAALRKSVVLPCQMADADDPSGAAWGMEIGWPTDVRHVAHVTFDRLHGFLGLPVEFELEIPGQVPSASASVFGVSPESMQCGYDDKGNSVPKILLLMQERLYAQDGLKAEGIFRITPENSQEEHVREQLNSGIVPDDIDVHCLASLIKAWFRELPEGVLDRLSPEQVLHCNTEEQCIELVKLLPATQAALLHWVVELMADVVEEEESNKMNARNVAMVFAPNMTQMSDPLTALMHAVQVMNLLKTLILKTLREREDDDAGAYSSFSSSLSSSGELDEDDGHDQQDDENDSGSEKNYNGSANGRPRDIDKATALRVDSEQLIGVSRRHTSTDFHLPYIRYSNDSEDVSLDDIEECFLRRLEWKSVRESVDEGDSRNSPPSEKEAEWLSSSENVTEASNAIGEERGRTSNATDVSFNELRQTETRIEMTSAAKGELILCS

SEQ ID NO: 411 - DNA, 2562 bp, Zea mays
atggaggacgttctgacaccgccgccgcagccggaactcgccggagagaagcgtaagagggaggagagttcgctggatgcgtccatcgaagacgctccatccgcccccgcctccacctgcagcgctgaggatgcggccggcagcgacgtcgcccggcacccgatgtggaagacgagcctgtgctccttcttccgccgccgcggcgccggcgccgaagggtgcagtcacggggactcctgccgctacgcgcacaccgaggaggagctccgcccacggcccgacggcacctgggaccccacctccgaccgcgccaaggagctgcgcaaggtcgccgcggaggcccaggaggaggccgaggaggaggtcacggtggatgagcagtcactcgacaagtgcctcgtcgggcttcccaggggctggacggctgataggctcaagtccttgctccaggatcagggaatctcgtatgcaacagcaaagaaaaagaagggaatgacagttggttttgtgacttttcagagtgttgaacaactaacaaatgcagttcaggtccttaaggagaacccttctgatggaaagcaaattaagatagtagatgccaatcgtaggtcccatcaaaaggcacatgctggagcacctgtatccaatactggaactgcaacagaaaatggtagtagtcctactacacctgcagaggaaacatctgtgcctgaatcggtgtcatcaagtaaaaaaggtgcccgtgatgcagttactccccttgcccatatgacttacattgatcagctagaacacaaaaagcaatctatggcacagatactgaagaaacttactcgcaatgctaggaaagcttgcccacctaccattccccatcctgattgggtttttaaatcaaaggaaatcggtggccttccttgcaagtttgaaggcattttggagtccccagttgttaatggataccgtaacaagtgtgagttctctgtaggatattctttagagggcaaaaagacagtaggatttatgctcggaaatttcagggaaggcgtgactgctgttgaggaacctgagaactgtccaaatgtctcagaaatttcctgcaaatatgctaaaatgttccaagattttcttcaatcatcaagtttccctttgtggagcaagattgacaactctgggttttggcgccaactcacagttcgtgagggaagatgtccagctgaagctgttgtttcacagaatgcagaatcacaaatatcagaagtcatgcttattgtgcaggtgtgttcgacaagtgttgatgaagctcttatgaaagaagagtttgacaagctgtctgctgccctggtacaaggagcagcaacatgctcacctcccttgccactgacaactattgtagtgcaagatcataaagggatatcaaatgctgcacctactgattgcccactgatcccgctattggtaccaaagggagataagttggatggcacatcagaagataaaacaagaatccatgatcacataagcaacttaaagttctctatatcaccaacagcttttttccaggttaatactcttgctgcggaaagattgtatgcccttgctggtgattgggctaatctcaattcagacacattactttttgatgtgtgttgtgggactggaactattggcctgaccttagcacagcgtgttggaatggttgttgggattgaaatgaatgaatcggcagtttcagatgctcacagaaatgctcttatcaatggcataaaaaattgtcgctttgtctgtggtaaggctgaagatgtgatggggccccttctcacagaatatcttggttcaccacagcagcaggctgcagcttctaaaagtaattctgaaatcgatgatacaagcaaaactgaggatatgattggttgtgcaagttatgatggtgaaaatatagatagctcaaagcagagacatgacaatgctgaaggtcagcagcctatggacacgtcagttgatcatcctacctgtgcaagtgaggtggatgggatggacgtggttgattgcaatcatgatgaaaacaatgtggcttctggtgaacaaaattgtggggaagcatcattgattaatggtaaacccattgagacatcatcagataatagtttggagcaaggcaagacatgcaaggatggttcttccagtccaaacaacaatgtccttgctgctaatgcatgccagtttaagaatgtcgttgctattgtagaccctccacgtgttggccttcaccctactgtgatcaaggcattgaggacgcatccacgtattcgacgtctagtgtacatttcctgcaaccctgacagtctagtcgccaacgggatcgagctttgcacaccaacacccgagaaacaagagaagaacaaaggcaaccgagggtggcggtctatgagcagcgcgggtctcgctcggcagaggacgaagtcgatgcccaactctgaaccttttatccccaagagggcaatggctgtcgatctgttccctcacacaccgcattgcgagatggttatgctttttgagaggtga

SEQ ID NO: 412 - protein, 853 aa, Zea mays
MEDVLTPPPQPELAGEKRKREESSLDASIEDAPSAPASTCSAEDAAGSDVARHPMWKTSLCSFFRRRGAGAEGCSHGDSCRYAHTEEELRPRPDGTWDPTSDRAKELRKVAAEAQEEAEEEVTVDEQSLDKCLVGLPRGWTADRLKSLLQDQGISYATAKKKKGMTVGFVTFQSVEQLTNAVQVLKENPSDGKQIKIVDANRRSHQKAHAGAPVSNTGTATENGSSPTTPAEETSVPESVSSSKKGARDAVTPLAHMTYIDQLEHKKQSMAQILKKLTRNARKACPPTIPHPDWVFKSKEIGGLPCKFEGILESPVVNGYRNKCEFSVGYSLEGKKTVGFMLGNFREGVTAVEEPENCPNVSEISCKYAKMFQDFLQSSSFPLWSKIDNSGFWRQLTVREGRCPAEAVVSQNAESQISEVMLIVQVCSTSVDEALMKEEFDKLSAALVQGAATCSPPLPLTTIVVQDHKGISNAAPTDCPLIPLLVPKGDKLDGTSEDKTRIHDHISNLKFSISPTAFFQVNTLAAERLYALAGDWANLNSDTLLFDVCCGTGTIGLTLAQRVGMVVGIEMNESAVSDAHRNALINGIKNCRFVCGKAEDVMGPLLTEYLGSPQQQAAASKSNSEIDDTSKTEDMIGCASYDGENIDSSKQRHDNAEGQQPMDTSVDHPTCASEVDGMDVVDCNHDENNVASGEQNCGEASLINGKPIETSSDNSLEQGKTCKDGSSSPNNNVLAANACQFKNVVAIVDPPRVGLHPTVIKALRTHPRIRRLVYISCNPDSLVANGIELCTPTPEKQEKNKGNRGWRSMSSAGLARQRTKSMPNSEPFIPKRAMAVDLFPHTPHCEMVMLFER

SEQ ID NO: 413 - DNA, 1434 bp, Zea mays
atggtggtcctcgccaagggtgagctcgagcagatcgccctcccggctgcagagccgcccccggccgacgtgcggtcggtggacctgtccgccccggcgggccccgcgcgcgaggccgcggcgcgcgcgctggtggcggcgtgcgaggagcacgggttcttccgggtgacgggccacggcgtgccggccagactcgtgcgcgccgcggaggccgcggcggccgggttcttcgcgcggccgcagggcgagaaggaggaggagggccccacgctcgggtacggaagcaagcgcatcggcggcaacggcgacctcggctgggtcgagtacctcctgctcggtggcacacccgccgccgcgccttcctcggcattattgccctgcgccgccgccccgtcgccgtccgcgccggccgggccgttacgggaccttctggacgagtacacggtggcggtgcggcggatggcgtgcgcggtgctggagctgatggcggaggggctgggcatcgccggcggcgccggggacgcggtgctggcgcggctggtggcgcgcgcggacagcgactgcatgctgcgggtgaaccactacccgccgcggccggcgctcaaccccagcctcacggggttcggcgagcacaccgacccgcagatcatctcggtgctccgcgccaacggcacctccggcctggagatcgcgctgcgggacggcgcctgggcctccgtcccgcccgacggggacgccttcttcgtcaacgtcggcgacaccctgcaggtgttgacgaacgggaggttcaggagcgtgaggcacagggtggtggtgaacagcgagaagtcccgggtgtccatggtcttcttcggcggccccgccgcccggcgagaggctgggcccgctgccgcagctcctgggcgacggcggccggagccggtaccgggacttcacctggagcgagttcaagaccagcgggtgcaggaccaggctcgcggaagaccgcctgtcccgcttcgagaagaagtagctagaggctacgtcatttgcatgaccggcggtaggatcgattaccatgtatgcttctctgtatatgtcagttgcattgccacagctctagctactggcgcccgtacgtgtatattagtggccatgctcgtattgtacgtgcacgtgtatgcacgcatatacatggtggcaccacacagggtatcatgcatccaatgttatctattatccatggagtaccaaccatgcatgcatggtcctgttattagcttttacaattacaattatcccccggtgcttccagacagtccaggcgtcgtacgtgtgcgggtgtcggtaaaccaatcagcggtgcaacaacgtaggcatgatgacgtattacgcacagccaccaatgatgctggcacaggcagagatccaagtaggactatctatcaggactag

SEQ ID NO: 414 - protein, 477 aa, Zea mays
MVVLAKGELEQIALPAAEPPPADVRSVDLSAPAGPAREAAARALVAACEEHGFFRVTGHGVPARLVRAAEAAAAGFFARPQGEKEEEGPTLGYGSKRIGGNGDLGWVEYLLLGGTPAAAPSSALLPCAAAPSPSAPAGPLRDLLDEYTVAVRRMACAVLELMAEGLGIAGGAGDAVLARLVARADSDCMLRVNHYPPRPALNPSLTGFGEHTDPQIISVLRANGTSGLEIALRDGAWASVPPDGDAFFVNVGDTLQVLTNGRFRSVRHRVVVNSEKSRVSMVFFGGPAARREAGPAAAAPGRRRPEPVPGLHLERVQDQRVQDQARGRPPVPLREEVARGYVICMTGGRIDYHVCFSVYVSCIATALATGARTCILVAMLVLYVHVYARIYMVAPHRVSCIQCYLLSMEYQPCMHGPVISFYNYNYPPVLPDSPGVVRVRVSVNQSAVQQRRHDDVLRTATNDAGTGRDPSRTIYQD

SEQ ID NO: 415 - DNA, 1712 bp, Zea mays
ctgttcgttgcaacaaattgatgagcaatgcttttttataatgccaactttgtacaaaaaagcaggcttaaacaatggcgaagggcgacgacgcgctggcgcggaagcgcaaccgtgtgcgccgcaagcgcctccgtagcagcgagaacgctgtttccgcgcgtgtcgcggcgatcatcgcctccaagcaccgccgcaagtcggggaagcgccgcgcctgcgagggcatgtgcttctcgctccccacgcccgacgacccgttcaacgagcgccatggcaggaagcacaagctcgatgacgagccggccgacgacacagccgccgacgccgctgaggacagcggcaaccccaagaagaagggcgcgaacaccaaaaagcagcagccggtggcaaagtatggcgccgaggcgaagtcgaaggcggttcgcgagagggagacgggtgcggaggtggtccgcggggacttcgaccggccgtccaagttcctggtggtctgtctcaacgctatccgggatgcggtggcgcccgaggaaggcggtggcagcatccacggcgccggcgactggggcgtggagctctggcggtgctgctccgcccaggcgccgtccgacgtgctcgacgctagcggcgcgtgcgccacggtggcgcagaccgcgtggctcgtctccaccgcctgcgacatcgtcgctaggaaagagaggcatgggatggtcgtgtcttgccccttcctgctgtacctcgtctcgtcgcaggataaggccgcgcaggtgcgatcgatatgcaaacccctgaagcctcttgggattcattcagtgagcttgcatcctggcgcatccattgaacaccagatctctggactgaaaacttgtgagccggagtttcttattgctacccccgagaggcttcttgaacttgtttcgttaaaggcgattgacatatcaggtgtatcaatgttggtcattgatggactgaaatgtttcgtagaccacaatgttagtgacaaaatattttctattagagacgccatatcaaacaatcttcagattactatcttcaccgatccatctgataaaaatattgcaacaatggctaaaaatctactccgtggaagaattacaaagctttctatcaatgattctgtttcttcacgaagtgcatttatagcccagcatgtacacttctgtccatcggaggagctgaaaacaacaaaggttaaggaaattcttgagcagatattgcaagatcatcctaaaaagacatcaaaggtgcttctagtagctgcaagcgataaaaaagcacggctcatgtcactgtcgctgaagctggaaaattgcacagtgattgatgactcatgtggcaactcctttacaatatgcagcagtgtggggctgatgaatgtcattgtgaaagaccgggagaacatgtcagtgacagatgtagaggcattcgaaaccgtgctggtggtggatctgcctccttcagtcgacgaatacattgagatcctcactggggctgctcttcatgtgattggaggcgaagtgcatagcatattctgtaacactgatgcttctgttgcaaaacctctggctcagcttcttgcagactgcggtcaggtggtgcctgaattcctcaaaagcctgaagtcttcatagacccagctttcttgtacaaagttggcattataaaaaaagcttgcttatcaatttgttgca

SEQ ID NO: 416 - protein, 525 aa, Zea mays
MAKGDDALARKRNRVRRKRLRSSENAVSARVAAIIASKHRRKSGKRRACEGMCFSLPTPDDPFNERHGRKHKLDDEPADDTAADAAEDSGNPKKKGANTKKQQPVAKYGAEAKSKAVRERETGAEVVRGDFDRPSKFLVVCLNAIRDAVAPEEGGGSIHGAGDWGVELWRCCSAQAPSDVLDASGACATVAQTAWLVSTACDIVARKERHGMVVSCPFLLYLVSSQDKAAQVRSICKPLKPLGIHSVSLHPGASIEHQISGLKTCEPEFLIATPERLLELVSLKAIDISGVSMLVIDGLKCFVDHNVSDKIFSIRDAISNNLQITIFTDPSDKNIATMAKNLLRGRITKLSINDSVSSRSAFIAQHVHFCPSEELKTTKVKEILEQILQDHPKKTSKVLLVAASDKKARLMSLSLKLENCTVIDDSCGNSFTICSSVGLMNVIVKDRENMSVTDVEAFETVLVVDLPPSVDEYIEILTGAALHVIGGEVHSIFCNTDASVAKPLAQLLADCGQVVPEFLKSLKSS

SEQ ID NO: 417 - DNA, 2451 bp, Zea mays
atgggggaaggtgcaggtgaccgtgtcctgagccgcctccacagcgtcagggagcgcattggcgactcactctctgcccaccccaatgagcttgtcgccgtcttcaccaggctgaaaaaccttggaaagggtatgctgcagccccaccagatcattgccgagtacaacaatgcgatccctgaggctgagcgcgagaagctcaaggatggtgcttttgaggatgtcctgagggcagctcaggaggcgattgtcatccccccatgggttgcacttgccatccgccctaggcctggtgtctgggagtatgtgagggtcaacgtcagtgagctcgctgttgaggagctgagagttcctgagtacctgcagttcaaggaacagcttgtggaagaaggccccaacaacaactttgttcttgagctggactttgagccattcaatgcctccttcccccgtccttctctgtcaaagtccattggcaatggcgtgcagttcctcaacaggcacctgtcatcaaagctcttccatgacaaggagagcatgtaccccttgctcaacttccttcgcgcccacaactacaaggggatgaccatgatgttgaacgacagaatccgcagtctcagtgctctgcaaggtgcgctgaggaaggctgaggagcacctgtccaccctacaagctgataccccatactctgaatttcaccacaggttccaggaacttggtctggagaagggttggggtgattgcgctaagcgtgcacaggagactatccacctcctcttggacctcctggaggccccagatccgtccaccctggagaagttccttggaacgatccccatggtgttcaatgtcgttatcctctcccctcatggttacttcgctcaagctaatgtcttgggttaccctgacaccggaggccaggttgtctacatcttggatcaagtgcgcgctatggagaacgaaatgctgctgaggatcaagcagtgtggtcttgacatcacgccgaagatccttattgtcaccaggttgctccctgatgcaactggcaccacctgtggccagcgccttgagaaggtccttggcaccgagcactgccatatccttcgcgtgccattcagaacagaaaacggaatcgttcgcaagtggatctcgcgatttgaagtctggccgtacctggagacttacactgatgacgtggcgcatgagattgctggagagcttcaggccaatcctgacctgatcatcggaaactacagtgacggaaaccttgttgcgtgtttgctcgcccacaagatgggtgttactcactgtaccattgcccatgcgcttgagaaaactaagtaccctaactccgacctctactggaagaagtttgaggatcactaccacttctcgtgccagttcaccactgacttgattgcaatgaaccatgccgacttcatcatcaccagtaccttccaagagatcgccggaaacaaggacaccgtcggccagtacgagtcacacatggcgttcacaatgcctggcctgtaccgcgttgtccacggcattgatgtgttcgaccccaagttcaacatcgtgtctcctggcgcggacctgtccatctacttcccgtacaccgagtcgcacaagaggctgacctcccttcacccggagattgaggagctcctgtacagccaaaccgagaacacggagcacaagttcgttctgaacgacaggaacaagccaatcatcttctccatggctcgtctcgaccgtgtgaagaacttgactgggctggtggagctgtacggccggaacaagcggctgcaggagctggtgaacctcgtggtcgtctgcggcgaccatggcaacccttccaaggacaaggaggagcaggccgagttcaagaagatgtttgacctcatcgagcagtacaacctgaacgggcacatccgctggatctccgcccagatgaaccgcgtccgcaacggcgagctgtaccgctacatctgcgacaccaagggcgccttcgtgcagcctgctttctacgaggctttcgggctgacggtggttgaggccatgacctgcggcctgcccacgtttgccacagcctacggcggtccggccgagatcatcgtgcacggcgtgtctggctaccacatcgacccttaccagggcgacaaggcgtcggccctgctcgtggacttcttcgacaagtgccaggcggacccgagccactggagcaagatctcccagggcgggctccagcgtatcgaggagaagtacacctggaagctctactcggagaggctgatgaccctcaccggcgtgtacgggttctggaagtacgtgtccaacctggagaggcgcgagacccggcggtacctggagatgctgtacgcgctcaagtaccgcaccatggcgagcaccgtgccgctggccgtggagggagagccctccagcaagtga

SEQ ID NO: 418 - protein, 816 aa, Zea mays
MGEGAGDRVLSRLHSVRERIGDSLSAHPNELVAVFTRLKNLGKGMLQPHQIIAEYNNAIPEAEREKLKDGAFEDVLRAAQEAIVIPPWVALAIRPRPGVWEYVRVNVSELAVEELRVPEYLQFKEQLVEEGPNNNFVLELDFEPFNASFPRPSLSKSIGNGVQFLNRHLSSKLFHDKESMYPLLNFLRAHNYKGMTMMLNDRIRSLSALQGALRKAEEHLSTLQADTPYSEFHHRFQELGLEKGWGDCAKRAQETIHLLLDLLEAPDPSTLEKFLGTIPMVFNVVILSPHGYFAQANVLGYPDTGGQVVYILDQVRAMENEMLLRIKQCGLDITPKILIVTRLLPDATGTTCGQRLEKVLGTEHCHILRVPFRTENGIVRKWISRFEVWPYLETYTDDVAHEIAGELQANPDLIIGNYSDGNLVACLLAHKMGVTHCTIAHALEKTKYPNSDLYWKKFEDHYHFSCQFTTDLIAMNHADFIITSTFQEIAGNKDTVGQYESHMAFTMPGLYRVVHGIDVFDPKFNIVSPGADLSIYFPYTESHKRLTSLHPEIEELLYSQTENTEHKFVLNDRNKPIIFSMARLDRVKNLTGLVELYGRNKRLQELVNLVVVCGDHGNPSKDKEEQAEFKKMFDLIEQYNLNGHIRWISAQMNRVRNGELYRYICDTKGAFVQPAFYEAFGLTVVEAMTCGLPTFATAYGGPAEIIVHGVSGYHIDPYQGDKASALLVDFFDKCQADPSHWSKISQGGLQRIEEKYTWKLYSERLMTLTGVYGFWKYVSNLERRETRRYLEMLYALKYRTMASTVPLAVEGEPSSK

SEQ ID NO: 419 - DNA, 1092 bp, Zea mays
taatgattttattttgactgatagtgacctgttcgttgcaacaaattgatgagcaatgcttttttataatgccaactttgtacaaaaaagcaggcttaaacaatggcagcgccaggctccctgcgacttctccaggccccgtccttcgctgcggccaagtgccagccggtgggtggccgggcatccgcgcggcgagcgccacggccactgttcgccgtgcgcgcctcggctgctgacgccgccaacagggatgccgtgctcaaggccttccgcgagaacagggctctcaagataatttccggtcttcagaactttgacaggagcagtgttgcatctgttgtcacagctgcagataagggaggtgcaacacatgttgacatagcatgtgacaaggacttagtaaagcttgccatggatcttaccaaccttccgatctgtgtctcatctgtagatccttcagcgttccattctgcagtacaagcaggagctaaaatggttgagattggaaactatgattctttttatgagatgggcattgagttctcctctgagcagatactgaagctaacaagggaaacaaggaagatgcttccagacatcaccttatcagtaacagttcctcacacacttagtttgccagatcagatgagactagcagagctactcgaagaggaaggagctgatataatccaaactgagggtgggaaatgttctagcccgacaaaacctggagtgcttggattgattgaaaaggcaacaccaacactcgccgcagcatactccatctctcgggctgttagtattccagtgatgtgctcgtcagggttaagctcggtgactgcaccaatggcagtaactgcaggagctgctggagttggagtcggttctgctattaacaaactcaacgacgttgtggcaatgatcgctgaggtgagaagcattgcgcaaacaatggagcttgcgccaagaatcgtgtccgaaaccctgagaacaattagttactagacccagctttcttgtacaaagttggcattataagaaagcattgcttatcaatttgttgcaacgaacaggtcactatcagtcaaaata

SEQ ID NO: 420 - protein, 300 aa, Zea mays
MAAPGSLRLLQAPSFAAAKCQPVGGRASARRAPRPLFAVRASAADAANRDAVLKAFRENRALKIISGLQNFDRSSVASVVTAADKGGATHVDIACDKDLVKLAMDLTNLPICVSSVDPSAFHSAVQAGAKMVEIGNYDSFYEMGIEFSSEQILKLTRETRKMLPDITLSVTVPHTLSLPDQMRLAELLEEEGADIIQTEGGKCSSPTKPGVLGLIEKATPTLAAAYSISRAVSIPVMCSSGLSSVTAPMAVTAGAAGVGVGSAINKLNDVVAMIAEVRSIAQTMELAPRIVSETLRTISY

SEQ ID NO: 421 - DNA, 566 bp, Zea mays
ttttttataatgccaactttgtacaaaaaagcaggcttaaacaatggcggacgtcgatgtcgaaccggaggttgccgccggagctcccaagaagaggacgttccgcaagtacagctaccgcggcgtcgacctagatgcgcttctcgacatgtccactgacgacctcgtccagctcttccccgcgcgcgccaggagaaggttccagaggggtctgaagaggaagcccatggcgctcatcaagaaactgcgcaaggcgaaaaaggatgctcctgctggtgagaagcctgagccagtcaagacacatctccgtaacatgatcattgtccctgagatgattggaagcattgttggtgtctacaacggcaagaccttcaaccaggttgagatcaagcctgagatgatcggccactaccttgctgagttctccatctcctacaagccggtcaagcacggcaggcccggtatcggtgccacccactcctcgcggtttattcctctgaaatgaacccagctttcttgtacaaagttggcattataagaaagcattgcttatcaatttgttgcaa

SEQ ID NO: 422 - protein, 153 aa, Zea mays
MADVDVEPEVAAGAPKKRTFRKYSYRGVDLDALLDMSTDDLVQLFPARARRRFQRGLKRKPMALIKKLRKAKKDAPAGEKPEPVKTHLRNMIIVPEMIGSIVGVYNGKTFNQVEIKPEMIGHYLAEFSISYKPVKHGRPGIGATHSSRFIPLK

SEQ ID NO: 423 - DNA, 598 bp, Zea mays
acaaattgatgagcaatgcttttttataatgccaactttgtacaaaaaagcaggcttaaacaatgtcgctcgtgaggcgcagcaacgtgttcgaccccttctcgatggatctctgggaccccttcgacaccatgttccgctccatcgtcccgtcggcgacctccaccaactccgagactgccgccttcgccagcgcccgcatcgactggaaggagacgcccgaggcgcacgtgttcaaggccgacctccccggcgtcaagaaggaagaggtcaaggtcgaggtcgaggacggcaacatgctggtcatcagcggccagcgcagcagggagaaggaggacaaggacgacaagtggcaccgcgtcgagcgcagcagcggccagttcgtcaggcgcttccgcctgccggagaacaccaaggtggatcaggtcaaggctggcctcgagaacggcgtgctcacggtcaccgtgcccaaggcggaggagaagaagcctgaggtgaaggctattgagatctctggttgaacccagctttcttgtacaaagttggcattataagaaagcattgcttatcaatttgttgcaacgaacaggtcactatc

SEQ ID NO: 424 - protein, 154 aa, Zea mays
MPTLYKKAGLNNVAREAQQRVRPLLDGSLGPLRHHVPLHRPVGDLHQLRDCRLRQRPHRLEGDARGARVQGRPPRRQEGRGQGRGRGRQHAGHQRPAQQGEGGQGRQVAPRRAQQRPVRQALPPAGEHQGGSGQGWPRERRAHGHRAQGGGEEA

SEQ ID NO: 425 - DNA, 975 bp, Zea mays
ggccccaaataatgattttattttgactgatagtgacctgttcgttgcaacaaattgatgagcaatgcttttttataatgccaactttgtacaaaaaagcaggcttaaacaatggcgcagctgccgccgagggcgccggggggcgccgcgccgcaggaccactggtcggcggcgggggagttcctggggttcgccgcggccagacgcggcgcgcaccgccgctcggcgagcgactcggccgcgttcctcgaggccctgcccatggaagacgtcatcggcggcgacggcttcgaccgcctcgacgacgaccagctcatgtccatgttctccgacgtcgacgcgccggccgtctccgccggggacgcggcgcagctcatggacgtggcggacgccgacgcggacgcggacgacgacgggtcggccgcctcgtcgcgcgccgccgcggacggcgtcgccgctgaccccaaaagggtcaagaggatattagcaaacaggcagtcagcgcaaaggtcacgagtcaggaagctacagtacatctccgagctcgaacggagtgtcaccggtctccagatggaggtgtcagcgctgtcccctcgcgtggccttcctcgaccaccagcgatcgctgctcaccgtcggcaacagccacctcaagcaacgaatcgcggcgctcgcccaagacaagatcttcaaggatgctcatcaagaggcgctgaagaaggagatcgagcggctacgccatgtgtaccagcagcagcagcagcagcagcagatcaaggtggccaccaccggcggcgccgacatcgccgcggccgcctccatgcaggccaggcaagagctgctcgcgtgcgagggcgctgccattcgatagacccagctttcttgtacaaagttggcattataagaaagcattgcttatcaatttgttgcaacgaacaggtcactatcagtcaaaataaaatcattatttgccatc

SEQ ID NO: 426 - protein, 252 aa, Zea mays
MAQLPPRAPGGAAPQDHWSAAGEFLGFAAARRGAHRRSASDSAAFLEALPMEDVIGGDGFDRLDDDQLMSMFSDVDAPAVSAGDAAQLMDVADADADADDDGSAASSRAAADGVAADPKRVKRILANRQSAQRSRVRKLQYISELERSVTGLQMEVSALSPRVAFLDHQRSLLTVGNSHLKQRIAALAQDKIFKDAHQEALKKEIERLRHVYQQQQQQQQIKVATTGGADIAAAASMQARQELLACEGAAIR

SEQ ID NO: 427 - DNA, 1519 bp, Zea mays
ataatgattttattttgactgatagtgacctgttcgttgcaacaaattgatgagcaatgcttttttataatgccaactttgtacaaaaaagcaggcttaaacaatgagcgcggctgcggaggacgcggctgcggccgaagggggatccggaggcgggagcagcggcgcggggtcgtcggaagggggcgcgcggcgccggttcgacgacaagggcctcgtcgcccgcacctcgctcatcctgtggcacacgcaccagaacgacgtcggcgccgtgcggaagctgctggaggaggacgccgcgctcgtcaacgcccgggactacgacagccgcacgccgctccacgtcgccgcgctccacggctggcacgacgtcgccgagtgcctcgtcgccaacggcgccgacgtcaacgcccaggaccgctggcagaacacgccactagctgatgcggagggcgcaaagaggcagcccatgattgagctgctcaaggagcacggtggattgacatatgggaaaactggaagccattttgaaccaaagacgattccaccacctctaacaaataaggctgactgggagattaacccacttgaattggacttcacaaaagcaactgttatcggaaagggctctttcggtgaaattctgaaagcaaattggcgaggaacacctattgctgtcaagcgcattcttccatccttatctgatgacaggctggtgatccaagattttaagcatgaagtcaacttgctaataaagctgagacatccaaatgttgtccagttccttggagcagttacagaaaccaagcctctaatgctaattactgagtttctacgaggaggtgatcttcatcaatatctgaaggacaaaggtgcactcaacccacttaccgctgttaattttgcactggatattgcaagaggaatggcatatcttcataatgagcctaatgttgtgattcaccgagatttaaaaccaagaaacattcttctggtgaattctgctgccaaccacttgaaggttggagacttcggccttagcaagatcatcaaagcgcagcatgcgaatgatgtatacaagatgactggagagacaggaagctatcggtacatggcccctgaagttttcaagcaccggaaatatgacaagaaagttgatatcttctcttttgccatgattctatatgagatgctggaaggtgattcacccttctccaactacgaaccttatgaggctgctaagtacgtggcagatgggcatcgtccggttttccgtaaaaatcataccactgagttgaaggatttggttgagctatgttggtctggggacatcagtctgaggccatctttcttggagatcctcaagaggcttgagaagctcaaggagcattattcacacgagaaccactggcatttgttccagtagacccagctttcttgtacaaagttggcattataagaaagcattgcttatcaatttgttgcaacgaacaggtcactatcagtcaaaataaaatca

SEQ ID NO: 428 - protein, 440 aa, Zea mays
MSAAAEDAAAAEGGSGGGSSGAGSSEGGARRRFDDKGLVARTSLILWHTHQNDVGAVRKLLEEDAALVNARDYDSRTPLHVAALHGWHDVAECLVANGADVNAQDRWQNTPLADAEGAKRQPMIELLKEHGGLTYGKTGSHFEPKTIPPPLTNKADWEINPLELDFTKATVIGKGSFGEILKANWRGTPIAVKRILPSLSDDRLVIQDFKHEVNLLIKLRHPNVVQFLGAVTETKPLMLITEFLRGGDLHQYLKDKGALNPLTAVNFALDIARGMAYLHNEPNVVIHRDLKPRNILLVNSAANHLKVGDFGLSKIIKAQHANDVYKMTGETGSYRYMAPEVFKHRKYDKKVDIFSFAMILYEMLEGDSPFSNYEPYEAAKYVADGHRPVFRKNHTTELKDLVELCWSGDISLRPSFLEILKRLEKLKEHYSHENHWHLFQ

SEQ ID NO: 429 - DNA, 817 bp, Zea mays
tgcaacaaattgatgagcaatgcttttttataatgccaactttgtacaaaaaagcaggcttaaacaatgagcagcctgtcctccggcatctctgcctcgccatctgcagcgcccagcaccgctcggcgccgccatgacgcagcgccgcagcagctgagggtgaaggcggcggcgcggccacagctgctgcacgccggccgccggcgttcgagtgtcgggaggaggccgggcggcggcgcggtggtggtgagggccgggcctgggccgctgtcggagatcgagccggacctggaggaggacgccatcgacgtgtaccgcaccaacggcatcagcccggaggacttcgagtacgggaagtatgacggacaccacacctatttcgaaggccaagacaagaagggcttctgggaggatgtctccgagtggtaccaagaagctgagcctcctcagggctttcaagcactcatctcctgggcatttcctcctgcgatcatcctcggcatggctttcaatgtgccgggggagtacctgtacatcggggcggccgtcttcatcgtggtgttctgcgtcatcgagatgggcaagcccgacaagccgcacaacttcgagccggagatctacatgatggagaggtcggcccgcgacaagctcatcgccgactacaactccatggacatctgggacttcaacgagaagtacggcgagctctgggacttcaccgtcaacaccagggacgacatcgtcaagtcgacctagacccagctttcttgtacaaagttggcattataagaaagcattgcttatcaatttgttgcaa

SEQ ID NO: 430 - protein, 229 aa, Zea mays
MSSLSSGISASPSAAPSTARRRHDAAPQQLRVKAAARPQLLHAGRRRSSVGRRPGGGAVVVRAGPGPLSEIEPDLEEDAIDVYRTNGISPEDFEYGKYDGHHTYFEGQDKKGFWEDVSEWYQEAEPPQGFQALISWAFPPAIILGMAFNVPGEYLYIGAAVFIVVFCVIEMGKPDKPHNFEPEIYMMERSARDKLIADYNSMDIWDFNEKYGELWDFTVNTRDDIVKST

SEQ ID NO: 431 - DNA, 1198 bp, Zea mays
ccccaaataatgattttattttgactgatagtgacctgttcgttgcaacaaattgatgagcaatgcttttttataatgccaactttgtacaaaaaagcaggcttaaacaatggagaaccctgcgagtgtgctagttctaccagcgcagttcaccaaactcaccttcggaaacctgtacatccgccgggccgggccgggcagcagggagataaccgaggagggcaggtgcgacctggacaagagatacgtgagtgacttccccgtctacgacggccgcggccccgacgccagccttgtggcccgcgtgcaggggatcaccagcgaaatcgggaacgcgcaccaactgttcgtcgttgttttcgacaccgacaggctcaagggctccacgctcgtcaccaatggcgtgataacggccgggtctgacgagtgggcgatctacggcggaaccggggtgtttgccatggcgaggggcgtcataaggagaaggtatctcgccgacagggccggcgggaacactgatgagctcaacatggatgtcttctgccggccgtttggctcacagtcagagctgcaagataagatgcaggtgcaggggcagggctctagcgtcaccaagattggactatggggtggaccgggagggtcggcacaggacatcacggcggagcggccgccgcagcgtctgcacagcgtcaccgttcgtgctggcgtcgccgtcgactccatcgagttcacctatactgacagcgctgggcagaggcgcgccgctgggcgatggggtggactcgggggcaatgttcgaacgatcgaccttggcgacgccgaggatgtcagggaagtctcgggaacatacggcgcatttgaaggtgccactacgctgacctcgctcaggctcgtcaccagcagcagaacctggggcccctggggtgtcgagaacgggacgcgtttctccgtcacggcgcccatcggcagcagcatcgtgggattctatgcgcgggcgggaaccaggctcgtcgatgctatcggtgtttacttgcgtcagatttaaacccagctttcttgtacaaagttggcattataagaaagcattgcttatcaatttgttgcaacgaacaggtcactatcagtcaaaataaaatcattatttgccatccagctgatatcccctatagtgagtcgtattacatggtcatagctg

SEQ ID NO: 432 - protein, 312 aa, Zea mays
MENPASVLVLPAQFTKLTFGNLYIRRAGPGSREITEEGRCDLDKRYVSDFPVYDGRGPDASLVARVQGITSEIGNAHQLFVVVFDTDRLKGSTLVTNGVITAGSDEWAIYGGTGVFAMARGVIRRRYLADRAGGNTDELNMDVFCRPFGSQSELQDKMQVQGQGSSVTKIGLWGGPGGSAQDITAERPPQRLHSVTVRAGVAVDSIEFTYTDSAGQRRAAGRWGGLGGNVRTIDLGDAEDVREVSGTYGAFEGATTLTSLRLVTSSRTWGPWGVENGTRFSVTAPIGSSIVGFYARAGTRLVDAIGVYLRQI

SEQ ID NO: 433 - DNA, 591 bp, Zea mays
atggcagcgagcaacatcgggatgatggacggagcctacttcgtcgggcgcaacgagatcctcgcgtggatcaacactacgctgcagctcggcctctccaaggtggaggaggcggcgtcaggcgcggttgcgtgccaactgatggacgcggcgcatcccggcgccgtgccgatgcacaaggtcaacttcgacgccaagacggagtacgacatgatccagaactacaaggtcctgcaggatgtgttcaacaagctcaagatcactaagcatatagaggtgaacaagcttatcaaaggaaggccccttgacaatctggagttcatgcagtggatgaaacgatattgtgattctgtcaatggtggcttcatgagcagctacaatgcttctgagagaagggaaagcagcaaagggggaaaggagacgaacagaagggcatcggtgccctctcacacaccggccaagtctgcatccacaggtcacaaggctcaagcatcacatggtgccaagcgggcaagcgggcagacggcgggtgcaccacagcgcagcgctaagccatcacctgcagcccagctctggcggaccagcttatga

SEQ ID NO: 434 - protein, 196 aa, Zea mays
MAASNIGMMDGAYFVGRNEILAWINTTLQLGLSKVEEAASGAVACQLMDAAHPGAVPMHKVNFDAKTEYDMIQNYKVLQDVFNKLKITKHIEVNKLIKGRPLDNLEFMQWMKRYCDSVNGGFMSSYNASERRESSKGGKETNRRASVPSHTPAKSASTGHKAQASHGAKRASGQTAGAPQRSAKPSPAAQLWRTSL

SEQ ID NO: 435 - DNA, 1175 bp, Zea mays
ataatgattttattttgactgatagtgacctgttcgttgcaacaaattgatgagcaatgcttttttataatgccaactttgtacaaaaaagcaggcttaaacaatggcgacggtgctgccgcttgccgccgcctcggcctcgcccacgccgaggacttgcatctccggcggcccagttcccgcgcgattccttgggactcgcatgcgtctccgcatccacatcccaccgcggggcgttgcctgcgccctccgaaggagacccaccaagtacaagactaaaatccagagtgaggaggatgtggtggctgcagaagatgtcatggatgatgatgacgacgaggatggtgcactggaagcacttttcaagcagctggaagaagatcttgacaatgatgatttatctgtcgatgataatgatatatcagaagaagatatggcaaggtttgaaaaggagttggcagaagcgattgaagatgtcagtggtgttgatgactcagcgggggattcgttgctgagctctggcgactatggtattgatgagcaactagatggaagcgaacgggtagagctgaaaacctggcaactccggagattggctcgtgcactgaaaataggccggcgtaaaactagtattaagaatcttgcaggggagctaggcctagataggggtttggttattgaaatgctccgcaatccaccaccgaagcttctactcatgtctgattctttgcctgatgaagtcccttctaaatctcaagtgaaggaaatagaaacccctagtacgaccactgttgacgaggttgataccagtgaaatcaaaccacagttggagcttccagtgcacgtcatgagtgcagaatggtctgcaagaaaaagactgaaaaaggtgcaacttgagaccttagaaagagtctacctgcgaagcaaacggcccacgaatacaatggtcagcagcatagttcaagtgacaaaccttccgcgaaagaccattgttaagtggtttgaggatagaagggagcaagatggagtccctgaccatcgtgctgcattcaagagatccctatctgagattggtgctagttcataaacccagctttcttgtacaaagttggcattataagaaagcattgcttatcaatttgttgcaacgaacaggtcactatcagtcaaaataa

SEQ ID NO: 436 - protein, 327 aa, Zea mays
MATVLPLAAASASPTPRTCISGGPVPARFLGTRMRLRIHIPPRGVACALRRRPTKYKTKIQSEEDVVAAEDVMDDDDDEDGALEALFKQLEEDLDNDDLSVDDNDISEEDMARFEKELAEAIEDVSGVDDSAGDSLLSSGDYGIDEQLDGSERVELKTWQLRRLARALKIGRRKTSIKNLAGELGLDRGLVIEMLRNPPPKLLLMSDSLPDEVPSKSQVKEIETPSTTTVDEVDTSEIKPQLELPVHVMSAEWSARKRLKKVQLETLERVYLRSKRPTNTMVSSIVQVTNLPRKTIVKWFEDRREQDGVPDHRAAFKRSLSEIGASS

SEQ ID NO: 437 - DNA, 732 bp, Zea mays
taagctcgggccccaaataatgattttattttgactgatagtgacctgttcgttgcaacaaattgatgagcaatgcttttttataatgccaactttgtacaaaaaagcaggcttaaacaatggcccttacaactgatgaactcaagaccaaggccgaggtatactacggtgacgagatctgccagctgtgtacccagctcctgctcagggaagcaggcctccccaatggtctgcttccattgaaggacctaatcgagtgcggctatgtccaggaaactggattcgtgtggctgaagcaaagcaagagggttgaccacatcttccatagtctaggaaggctggtctcttacggcacggagatcaccggctatgccgagaagggcaggatcaggaaggtcaaagggataaagaccagggagctcatgctgtgggtcccggtggaggagattgctcttgatgatgatccagcgactgggaagcttgtctgcaagagcattgctgggattaccaaaaccttccctgcatcggctttccatatcccggagaaggagaacaatgtgaaggcgaactgtgctgcactcaagccggtggtcctcatggagagagctccacgagttgttaaaaacagctgaacccagctttcttgtacaaagttggcattataagaaagcattgcttatcaatttgttgcaacgaacaggtcactatcagtcaaaataaaatcattatttg

SEQ ID NO: 438 - protein, 170 aa, Zea mays
MALTTDELKTKAEVYYGDEICQLCTQLLLREAGLPNGLLPLKDLIECGYVQETGFVWLKQSKRVDHIFHSLGRLVSYGTEITGYAEKGRIRKVKGIKTRELMLWVPVEEIALDDDPATGKLVCKSIAGITKTFPASAFHIPEKENNVKANCAALKPVVLMERAPRVVKNS

SEQ ID NO: 439 - DNA, 1833 bp, Zea mays
gccccaaataatgattttattttgactgatagtgacctgttcgttgcaacaaattgatgagcaatgcttttttataatgccaactttgtacaaaaaagcaggcttaaacaatgctcttcgtcccgcgccaagtcgtactcgccgcctcatcacagccccgcgccgccgcctcttccgccatggccaaggaggaatccaagaaggagaagaagaaggccaaggccaaggtggccaatggagccgccgccgccgccgccgccccggtccctggcgcgagggccgcggtggtcgcctccgtcgccgccttcctcgagtccgctgggctctcgcgcacgctcgtcgccctccaatccgaggccggcctcgaggccggtgcgtgggggtcgtcacaggtgaacttggaggagctggttgccagattcttagagtcgagcaattcaactcgggcggctgccattctgggaagcgatgagcaagacaaggaaaatgatgatatagcaggagaagttggcaaggaaaaaaagaggagcggcacagaagccggtgagcctgagagcaaggcgatcgagcctttagctgaggaaaagccgactgaaaatatggacggtgaggctaaagagaagaaacaaaagaggaagaaagacaagggtgacccttcagctgcgaatgctgctagcgagggaacaactgaaattgtgaagaacgccgaccagaaggacgatgaggccaaggagaagaaacagaagaagaagaaggacaagggtgacccctcagctgcgggcgctggcagcggcgaaacaactgaaacagtgaaggaggatgatcataagcttgatggcaagaagaagaagaaaaacaagaagcagggaaaggatgatgatgtcgaagctaggctggaaaaggcagaattagcaatacttaacaagtttgaggcagcagaaaagctcaatggaagagaggtagaaccaaaaggtcagaatgacagtgctgatgactgcagtggtgctgtggaaaggaaaaagaagaagaaagagaaatcatctgccgggacttcagagaagactgatgcaggaagtgcacctgctgaggctgatggtgccaagggaaagaatggtgctgtagaaacagtcaaggatgataatgagaaaaaggccaaaaaaaagcggaagaagtctaaccctgaagaaactgttcaggtggaaggtaaggaggctgcagggaaagattcagtcccaaaacaagatgatgcgaacaagagtgtaatggagattgaagaaggtaaccaagggaagtcgtcaaatgaaaatgcagttgctggcaaaaaacggaagctagaagaagttgaaggaagcattccccctgtgactgggaaagaagattgcacagccaacgaaagtctaagcaatggttttgcagaggataaaaaagaagaaagcaacacaaaaccaagcaaaaggcagaaacattcatctgagcccaagactgtgaccccatttcaacgtattaaggtggacgacgtcagatttgcagatgacaggcttcaggataactcgtattgggctaagggtggcgcagacaccggttacggcgcaaaggcacaggagatccttggccaagtcaagggaagggggtttaggcacgagaaaaccaagaagaagcgtggcacctacaggggcgggcaaatcgacctgcaaacccactcgatcaagttcgagaattcagacgacgagtgaacccagctttcttgtacaaagttggcattataagaaagcattgcttatcaatttgttgcaacgaacaggtcactatcagtcaaaataaaatcattatttg

SEQ ID NO: 440 - protein, 540 aa, Zea mays
MLFVPRQVVLAASSQPRAAASSAMAKEESKKEKKKAKAKVANGAAAAAAAPVPGARAAVVASVAAFLESAGLSRTLVALQSEAGLEAGAWGSSQVNLEELVARFLESSNSTRAAAILGSDEQDKENDDIAGEVGKEKKRSGTEAGEPESKAIEPLAEEKPTENMDGEAKEKKQKRKKDKGDPSAANAASEGTTEIVKNADQKDDEAKEKKQKKKKDKGDPSAAGAGSGETTETVKEDDHKLDGKKKKKNKKQGKDDDVEARLEKAELAILNKFEAAEKLNGREVEPKGQNDSADDCSGAVERKKKKKEKSSAGTSEKTDAGSAPAEADGAKGKNGAVETVKDDNEKKAKKKRKKSNPEETVQVEGKEAAGKDSVPKQDDANKSVMEIEEGNQGKSSNENAVAGKKRKLEEVEGSIPPVTGKEDCTANESLSNGFAEDKKEESNTKPSKRQKHSSEPKTVTPFQRIKVDDVRFADDRLQDNSYWAKGGADTGYGAKAQEILGQVKGRGFRHEKTKKKRGTYRGGQIDLQTHSIKFENSDDE

SEQ ID NO: 441 - DNA, 453 bp, Zea mays
atgggccgcggccggggcgtgagctacgggggcgggcagagctcgctgagctacctcttcggcggcggcggcggcgacgaggccgccgcggcgcccgccaagccggctgcggcggcgcctgcgcctgcgccggtgccggcggcagcagacggcgagaagctcaaggggatcccggccggcgtccgcggcaaccagagccagaccaacaactacttccgggcgcaggggcagaactgcggcaacttcctcacggtaagccagccagacagccagtcgccggccacctattcttcctcttccccttttgtctctgcgctcctgacatcgttgccttcctctgccacggcgtggcccacaggaccgcccgtcgaccaaggtgcacgccgcgccgggcggcggctcgtcgctcggctacctcttcggcggcggacctcccgggagcaagtgatgtga

SEQ ID NO: 442 - protein, 150 aa, Zea mays
MGRGRGVSYGGGQSSLSYLFGGGGGDEAAAAPAKPAAAAPAPAPVPAAADGEKLKGIPAGVRGNQSQTNNYFRAQGQNCGNFLTVSQPDSQSPATYSSSSPFVSALLTSLPSSATAWPTGPPVDQGARRAGRRLVARLPLRRRTSREQVM

SEQ ID NO: 443 - DNA, 1011 bp, Zea mays
cgttgcaacaaattgatgagcaatgcttttttataatgccaactttgtacaaaaaagcaggcttaaacaatgataaggggcggcaaccaccagcaggcggcggacgtcgaggaggagctagcccggaacagcaggcacgccgccgccgtggcgacgtcgcggcaatggtcggcgcagacggagtcgcgcatcgtgcgcgtctcccgcgtcttcggcggcaaggaccgccacagcaaggtgaagaccgtcaagggcctgcgcgaccggcgggtgcgcctctccgtgccgacggcgatccagctctacgacctgcaggaccgcctcggcctcaaccagcctagcaaggtcgtcgactggctgctcaacgccgcgcgccacgagatcgacaagctgccgccgctgcagttcccgccgcaggacctcatggttgggcacctgacgccccacaacatgccgctgatggtgcacgacgagaagttcggacacctcgccgcggccgcggcgctcgcgagcggcggcggcggcggcgccaaggtcagccagcagggcaacgtcgtcgacgtcgacgggaccggagcccaccacttggtggggaggttccccggcggctaccaccggttcatggagctgaacagcgcgttgggcatggtcagtggcgcaatggcgccgccgtataacaacaactacaccggagaggcatggaataacagcggcggcggcgtgcatgacagcggctcgccgcagatcgtcgccgcagccgctcaccactcgccgttcccatcgttgctctccttggctccacgtccgcatcagctggcgttctactcctcggaagctgatcagcagtttcaggtggagaaccttggctcgcaaagcctgtccttgagctcggcgagggcttaccatgatcaggctagctagacccagctttcttgtacaaagttggcattataagaaagcattgcttatcaatttgttgcaacgaacaggtcactatcagtcaaaataaaa

SEQ ID NO: 444 - protein, 283 aa, Zea mays
MIRGGNHQQAADVEEELARNSRHAAAVATSRQWSAQTESRIVRVSRVFGGKDRHSKVKTVKGLRDRRVRLSVPTAIQLYDLQDRLGLNQPSKVVDWLLNAARHEIDKLPPLQFPPQDLMVGHLTPHNMPLMVHDEKFGHLAAAAALASGGGGGAKVSQQGNVVDVDGTGAHHLVGRFPGGYHRFMELNSALGMVSGAMAPPYNNNYTGEAWNNSGGGVHDSGSPQIVAAAAHHSPFPSLLSLAPRPHQLAFYSSEADQQFQVENLGSQSLSLSSARAYHDQAS

SEQ ID NO: 445 - DNA, 1129 bp, Zea mays
ccccaaataatgattttattttgactgatagtgacctgttcgttgcaacaaattgatgagcaatgcttttttataatgccaactttgtacaaaaaagcaggcttaaacaatggctttcctcaacatggagcagcagacctgggccttcacctttggtatcctaggtaacatagtctcactgatggtgtttctttcaccgctgccgacgttctaccgcgtgtaccgcaacaagtcgacggaggggttccagtcgacgccgtacgtggtgacgctcttcagctgcatgctgtggatcttgtacgccctgctcaagcccggcgccgagctgctggtcaccatcaacggcgtgggctgcgtcgtcgagaccgtgtacctggccatgtacctggtgtacgcgcccaaggccgcccgggtgctggcggccaagatgctgctggggctcaacgtcgccgtcttcggcctcgtcgcgctcgtcaccatgcttctctccgacgccggcctccgcgtgcacgtgctcggctggatctgcgtcagcgtctcgctcagcgtcttcgccgcgccgctcagcataatgcggcaggtgatccggaccaagagcgtggagttcatgcctatctcgctctccttcttcctggtgctcagcgcggtggtctggttcgcgtacggcgcgctgaagaaggacgtgttcgtggcgttccccaacgtgctgggcttcgtcttcggcctcgcgcagatggcgctgtacatggcgtacaggaagcccgcggcggcgctggtgataataccggagcagtccaaggaggaggtggccgagggcaaggcaagctgcggcggcgccgaggtgcaccccatcgacatcgcggaggtccacgacctgcagaccgtggtcgtcgacgtagacgtggagcctgtcacctacgccgctgcgtccggtatggtcgacggcagtgtcggaaggcctagggcgccggaggagctggtgatcaagcccgacatggtcaccgtcattgcggcggaggcgtagacccagctttcttgtacaaagttggcattataagaaagcattgcttatcaatttgttgcaacgaacaggtcactatcagtcaaaataaaatcattatttgccatc

SEQ ID NO: 446 - protein, 304 aa, Zea mays
MAFLNMEQQTWAFTFGILGNIVSLMVFLSPLPTFYRVYRNKSTEGFQSTPYVVTLFSCMLWILYALLKPGAELLVTINGVGCVVETVYLAMYLVYAPKAARVLAAKMLLGLNVAVFGLVALVTMLLSDAGLRVHVLGWICVSVSLSVFAAPLSIMRQVIRTKSVEFMPISLSFFLVLSAVVWFAYGALKKDVFVAFPNVLGFVFGLAQMALYMAYRKPAAALVIIPEQSKEEVAEGKASCGGAEVHPIDIAEVHDLQTVVVDVDVEPVTYAAASGMVDGSVGRPRAPEELVIKPDMVTVIAAEA

SEQ ID NO: 447 - DNA, 3102 bp, Zea mays
atggaggccagagtaacggtcctggccctgctgctagtgacagtatggtcaatctcgtgcaccagggctggcgccgccggcgacgagcgggcggcgctactcgcgctcaaagcgggcttcgtcgactcgctgggcgcgctcgccgactggacggacggcgccaaggccgcgccgcactgcaggtggacgggagtgcggtgcaacgccgccggcctcgtcgacgagctcgacctctccgggaagaacctgagcggcaaggtcacgggcgacgtgctccggctgccgtcgctcgccgtcctcaacctctcctccaacgcgttcgccaccgcgctgcccaagtccctggcgccgctgtccagcctccgggtgctcgacgtgagccagaactcgttcgaaggcgcgttcccggccggcctcggcgcctgcgctggcctcgacaccgtcaacgcctccggcaacaacttcgtcggcgcgctccccgccgacctagccaacgccacgtcgctccagaccgtcgacctcaggggcagcttcttcggcggcggcatcccggcggcttaccggagcctcaccaagctcaggttcctgggcctctccggcaacaacatcaccggcaagatcccgccggagctcggcgagctcgagtcgctcgagagcctcatcattggctacaatgcgctggagggtaccatcccgccggagctcggcggcctcgccaacctccagtacctcgacctcgccgtcggcaacctcgacgggcccatcccggcggagctcggcaggcttccggccctcaccgcgctatacctgtacaagaacaacctcgaaggcaagataccgccggagctcggcaacatctccacgctcgtcttcctcgacctgtccgacaactcgctcacgggcccgatccccgacgagatcgcgcagctgagccacctccggctgctcaacctcatgtgcaaccacctcgacggcaccgtgccggcgaccatcggggacatgccgagcctggaggtgctcgagctgtggaacaactccttgacagggcagctgcccgcgtcgctcggtaacagctcgccgttgcagtgggtggacgtgtcgtcgaactccttcaccggccccgtcccggctgggatctgcgacggcaaggagctcgccaagctgatcatgttcaacaacggcttcaccggcgggatcccggccgggctcgcgtcgtgcgcgtctctggtacgcgtgcgcatgcagagcaaccggctcaccggcacgatccccgttgggttcggcaagctgccgtcgctgcagcggctcgagctcgcaggcaacgacctgtccggagagatccccggcgacctagcgtcgtcgacgtcgctctcattcatcgacctatctcacaaccacctccaatacacgcttccgtcgagcctcttcacgatcccgacgctgcagagcttcttggcgtcagacaacctcatctccggcgagctccccgaccagttccaggattgcccggcactggcggcgctagacctgtcgaacaaccggctcgccggcgcgataccgtccagcctcgcctcgtgccagaggctggtgaagctgaacctcaggcacaaccggctcacgggcgagatacccaaggcgctcgcgatgatgccggcgatggccatccttgatctgtcgagcaactccttgaccggccacataccggagaatttcgggagctcgccggcgctggagacgctcaacctctcctacaacaacctgacggggcccgtgcccgggaacggcgtcctgcgttccatcaacccggacgagctggcgggcaacgccgggctgtgcggcggcgtgctcccgccgtgcttcgggagccgcgacacgggcgtggcggcggcgcggccccgaggcagcgcgcgcctgaggcgcatcgcagcgagctggctcgcggcgatgctcgccgccgtcgccgcgttcacggcgctcgtcggcgggcggtacgcgtaccggcggtggtacgcgggtcgctgcgacgacgagagcctcggcgcggagtcgggcgcgtgggcgtggcggctgacggcgttccagcggctcgggttcacgagcgctgacgtgctggcgtgcgtgaaggaggcgaacgtggtgggcatgggcgcgaccggggtggtgtacaaggcggagctcccgcgcgcgcgcgccgtgatcgccgtgaagaagctgtggcggccggcgccggtggacggcgacgcggcgagcgagccgaccgcggacgtgctcaaggaggtggcgctcctggggcggctccggcaccggaacatcgtgcggctgctggggtacgtgcacaacggcgcggcggacgccatgatgctgtacgagttcatgcccaacggcagcctgtgggaggcgctgcacgggcctccggggaagcgcgcgctgctggactgggtgtcccgctacgacgtcgccgccggcgtggcgcaggggctggcgtacctccaccacgactgccacccgcccgtgatccaccgcgacatcaagtccaacaacatcctcctcgacgccgacatggaggcccgcatcgccgacttcggcctcgcccgcgccctggcccgctccaacgagtccgtctccgtcgtcgccggctcctacggctacatcgcgccagagtacgggtacaccctgaaggtggatcagaagagcgacatctacagctacggcgtggtgctgatggagctcatcacgggtcaccgcgccgtggaggcggagttcggcgaagggcaggacatcgtggggtgggtgcgggacaagatccggagcaacacggtggaggagcacctggacccgcacgtcggcggccggtgcgcgcacgtccgggaggagatgctgctggtgctgcgcatcgccgtgctctgcacggccaaagcgccgcgggaccggccgtccatgcgcgacgtgatcaccatgctcggcgaggccaagccgcggcgcaagagcgggagcagcagcggcggcggcaccgccagcggcaaggacagcgccgcccccgccgtggcggtggacagggacaggccggtgttcagcaccacgccggattcagactacgcctag

SEQ ID NO: 448 - protein, 1033 aa, Zea mays
MEARVTVLALLLVTVWSISCTRAGAAGDERAALLALKAGFVDSLGALADWTDGAKAAPHCRWTGVRCNAAGLVDELDLSGKNLSGKVTGDVLRLPSLAVLNLSSNAFATALPKSLAPLSSLRVLDVSQNSFEGAFPAGLGACAGLDTVNASGNNFVGALPADLANATSLQTVDLRGSFFGGGIPAAYRSLTKLRFLGLSGNNITGKIPPELGELESLESLIIGYNALEGTIPPELGGLANLQYLDLAVGNLDGPIPAELGRLPALTALYLYKNNLEGKIPPELGNISTLVFLDLSDNSLTGPIPDEIAQLSHLRLLNLMCNHLDGTVPATIGDMPSLEVLELWNNSLTGQLPASLGNSSPLQWVDVSSNSFTGPVPAGICDGKELAKLIMFNNGFTGGIPAGLASCASLVRVRMQSNRLTGTIPVGFGKLPSLQRLELAGNDLSGEIPGDLASSTSLSFIDLSHNHLQYTLPSSLFTIPTLQSFLASDNLISGELPDQFQDCPALAALDLSNNRLAGAIPSSLASCQRLVKLNLRHNRLTGEIPKALAMMPAMAILDLSSNSLTGHIPENFGSSPALETLNLSYNNLTGPVPGNGVLRSINPDELAGNAGLCGGVLPPCFGSRDTGVAAARPRGSARLRRIAASWLAAMLAAVAAFTALVGGRYAYRRWYAGRCDDESLGAESGAWAWRLTAFQRLGFTSADVLACVKEANVVGMGATGVVYKAELPRARAVIAVKKLWRPAPVDGDAASEPTADVLKEVALLGRLRHRNIVRLLGYVHNGAADAMMLYEFMPNGSLWEALHGPPGKRALLDWVSRYDVAAGVAQGLAYLHHDCHPPVIHRDIKSNNILLDADMEARIADFGLARALARSNESVSVVAGSYGYIAPEYGYTLKVDQKSDIYSYGVVLMELITGHRAVEAEFGEGQDIVGWVRDKIRSNTVEEHLDPHVGGRCAHVREEMLLVLRIAVLCTAKAPRDRPSMRDVITMLGEAKPRRKSGSSSGGGTASGKDSAAPAVAVDRDRPVFSTTPDSDYA

SEQ ID NO: 449 - DNA, 1705 bp, Zea mays
cggccagtcttaagctcgggccccaaataatgattttattttgactgatagtgacctgttcgttgcaacaaattgatgagcaatgcttttttataatgccaactttgtacaaaaaagcaggcttaaacaatggacaccgtcggcgtccccgtggtggccgttgcgaatgggatcggggaggtggagcgcaaggtgcagaagagctactgggaggagcactccaagtgcctcactgtcgagtccatgatgctcgactcccgcgccgccgacctcgacaaggaagagcgacccgagatcctgtctttgcttccctcttacaaagggaaatcagttctagaactcggtgctggaattggacgctttactggagatctggcaaaagaagctgggcacgttctggcactagactttattgaaagtgtgattaagaagaaccaaagcataaatgggcatcacaagaacataaccttcaggtgtgccgatgtgacatctaacgacttgaagattgaagataactctgttgatctgatattttcaaactggctattaatgtatctttcagatgaggaggtccaaaagcttgtggggaaaatggtaaaatggttaaaggtcggaggccatattttctttagagaatcatgttttcaccaatctggagattccaaaaggaaggtgaacccaacacactatcgagaaccaaggttttataccaaggtatttaaagagggccattcatttgatcaagatggaggttcgtttgaactttctctagtgacctgtaaatgcattggggcttatgtcaaaaacaagaagaatcaaaaccagatatgctggttatgggaaaaggtaaaatcaacagaagacagagattttcaaagattcctggacaacgtgcaatacaaaacaagtgggatattacgttatgagcgtgtctttggtgaaggttttgtgagcactggtggaatcgagactacaaaggaatttgtgggcatgctcgatcttaaaccgggccagaaagtacttgatgtcggatgtggaattggaggcggcgacttttacatggctgcaaactatgatgtccatgttcttggtattgatctttcggtgaacatggtttcatttgcaattgaacgtgccattggacgcaagtgctctgttgaattcgaagttgctgattgcaccacaaaggattacccagaaaatagttttgacgtcatctacagccgtgacaccatccttcacatacaagacaagcctgctctgttcagaagcttcttcaaatggctaaagcccggcggcaaagtcctaatcagcgactactgtaagaatcctggaaaaccatcagaagaatttgctgcgtacattaagcagagaggctatgaccttcacgacgtgaaggcttatggacagatgctgaaggatgctggttttcataatgtcatcgcggaagatcgcactgagcagttcttgaatgttctacagagggagataggtgaagttgaaaagaacaaagacgctttcctggcagacttcacccaggaggactatgacgacattgtgaatggctggaacgcgaagctgaaacggagctctgccggcgagcagaggtgggggttgttcattgccaccaagtgaacccagctttcttgtacaaagttggcattataagaaagcattgcttatcaatttgttgcaacgaacaggt

SEQ ID NO: 450 - protein, 501 aa, Zea mays
MDTVGVPVVAVANGIGEVERKVQKSYWEEHSKCLTVESMMLDSRAADLDKEERPEILSLLPSYKGKSVLELGAGIGRFTGDLAKEAGHVLALDFIESVIKKNQSINGHHKNITFRCADVTSNDLKIEDNSVDLIFSNWLLMYLSDEEVQKLVGKMVKWLKVGGHIFFRESCFHQSGDSKRKVNPTHYREPRFYTKVFKEGHSFDQDGGSFELSLVTCKCIGAYVKNKKNQNQICWLWEKVKSTEDRDFQRFLDNVQYKTSGILRYERVFGEGFVSTGGIETTKEFVGMLDLKPGQKVLDVGCGIGGGDFYMAANYDVHVLGIDLSVNMVSFAIERAIGRKCSVEFEVADCTTKDYPENSFDVIYSRDTILHIQDKPALFRSFFKWLKPGGKVLISDYCKNPGKPSEEFAAYIKQRGYDLHDVKAYGQMLKDAGFHNVIAEDRTEQFLNVLQREIGEVEKNKDAFLADFTQEDYDDIVNGWNAKLKRSSAGEQRWGLFIATK

SEQ ID NO: 451 - DNA, 1954 bp, Zea mays
ttttgactgatagtgacctgttcgttgcaacaaattgatgagcaatgcttttttataatgccaactttgtacaaaaaagcaggcttaaacaatggatacgctgtttaggttggttagccttcaagcctccgagcagcagcagcagcaatcggcgtcctacaactcgaggagcaccacgtcgagcggctccaggtcgtcgtcgcaccagaccaacgcatcctacaactactactaccacagcaacagcagcggcggcggcggcgggcagtactactacggtcagcagcacccacaccagcaccagcaccagcagtactacctggagccgtaccagcaggaagaatgcggcaacacccaccacctttacatggatgaagacttctcctcctcgtcctcgtcgaggcagcatttccactcgcacggcgcggtggtgcagccgccgacgtcgtccacggccacgcccacggcgccgacgccctcgctgtccacgtcgtccacggccgcgggggcggcgcacgcgctgttcgaggcggccgacctgtcgttcccgcctgacctcaacctcgacttctcgtccccggcctcgtcgtccggcgggggcgcggcctcgtcggcggcggtcgggggaggtggcgggggaaggtgggcgagccagctgctgctggagtgcgcgcgcgcggtggcgggccgcgacagccagcgcgtgcagcagctgatgtggatgctcaacgagctggcctcgccgtacggggacgtcgagcagaagctggcgtcctacttcctccaggggcccttcgcgcgcctcacggcgtccggaccgcggacgctgcgcacgctcgctgcggcgtccgaccggaacacgtccttcgactccacgcggcgcacggcgctgcggttccaggagctcagcccgtggtcgtcgtttgggcacgtggccgccaacggcgccatcctggagtcgttcccggaggccgccgcggcgtcgccggagccccagaggctccacatcctcgacctcagcaacacgttctgcacgcagtggcccacgctgctcgaggcgctcgccacgcggtccgccgacgacacgccgcacctgtcgatcaccacggtggtctcctccgcgccgtccgcgccgacggccgccgtgcagcgcgtgatgcgggagatcgggcagcggatggaaaagttcgcgcggctgatgggcgtgcccttcagcttccgcgcagtgcaccacgccggggaccttgcggggctcgacctcgacgcgctcgacctgcgcgacggcggcgccaccaccgcgctcgccatcaactgcgtcaactcgctgcgcggcgtggtgccgggcggtgcgcggagacgggacgcgttcgccgcgtccctccggcgtctcgatccgcgggttgttactgtcgtcgaggaggaggccgatctcgtggcttttgaccccggcgcgcccgaggaaagcggcgacacggaggcagcgttcctgaaggtgttcggcgagggcttgcggttcttctcggcttacatggactcgctggaagagagcttccccaagactagcaacgagaggctggcgctgaagaggggagccggacgtgccattgtagacttggtctcgtgcccggcgtcggagtccatggagcggcgggagacggcggcttcatgggcgcgccgcatgcggtcttccggcttctctccggtggcgttcagcgaggacgtcgccgacgacgtgcggtcgttgctccgtcggtatcgggaaggctggtcgatgcgggacgccggtttagacgactcggcagccggagcaggcgtcttcctggcgtggaaggaacagcctctcgtgtgggcgagcgcgtggaggccatgaacccagctttcttgtacaaagttggcattataagaaagcattgcttatcaatttgttgcaacgaacaggtcactatcagtcaaa

SEQ ID NO: 452 - protein, 592 aa, Zea mays
MDTLFRLVSLQASEQQQQQSASYNSRSTTSSGSRSSSHQTNASYNYYYHSNSSGGGGGQYYYGQQHPHQHQHQQYYLEPYQQEECGNTHHLYMDEDFSSSSSSRQHFHSHGAVVQPPTSSTATPTAPTPSLSTSSTAAGAAHALFEAADLSFPPDLNLDFSSPASSSGGGAASSAAVGGGGGGRWASQLLLECARAVAGRDSQRVQQLMWMLNELASPYGDVEQKLASYFLQGPFARLTASGPRTLRTLAAASDRNTSFDSTRRTALRFQELSPWSSFGHVAANGAILESFPEAAAASPEPQRLHILDLSNTFCTQWPTLLEALATRSADDTPHLSITTVVSSAPSAPTAAVQRVMREIGQRMEKFARLMGVPFSFRAVHHAGDLAGLDLDALDLRDGGATTALAINCVNSLRGVVPGGARRRDAFAASLRRLDPRVVTVVEEEADLVAFDPGAPEESGDTEAAFLKVFGEGLRFFSAYMDSLEESFPKTSNERLALKRGAGRAIVDLVSCPASESMERRETAASWARRMRSSGFSPVAFSEDVADDVRSLLRRYREGWSMRDAGLDDSAAGAGVFLAWKEQPLVWASAWRP

SEQ ID NO: 453 - DNA, 850 bp, Zea mays
taatgattttattttgactgatagtgacctgttcgttgcaacaaattgatgagcaatgcttttttataatgccaactttgtacaaaaaagcaggcttaaacaatggaagttgctcctgcggtgaagcaactcctccccatggcgcagggccccaactccccgtcctcctccaccacctcgccctcgcccgccgcgccgtccccgccgccgcgccagcagcagtcgcaggcgcccgtgccgcgcatcatcgacaccacgcccttccccaccaccttcgtgcaggccgacaccgccaacttcaagcaggtcgtccagaggctcaccggctccgacacgccgccgcctgcccagaagcccgccaagacccacggccaccaccaccaccacggcggcggcgtcgggcccaagaagccggccttcaagctctacgagcgccggatcggcaagaacaacctcaagatgatcgcgccgctggcggggccgtcgccgcggaaggcggcgccggaggtgctgtcgcccagcgtgctcgacttcccttccctggcgctcggtagccccgtcacgccgctgctggccgaccccttcaaccggtcggcgtcggcgtccccgggcgagcaggacgaggccgaggccgcggccatcgcgcagaggggcttcttcctgcacccctcgccgaggggcgtcgagccgccacggctgctgccgctgttccccgtcacgtcccccaagatggcgccgtggccgtcgcagcagtgaacccagctttcttgtacaaagttggcattataagaaagcattgcttatcaatttgttgcaacgaacaggtcactatcagtcaaaataaaatcat

SEQ ID NO: 454 - protein, 217 aa, Zea mays
MEVAPAVKQLLPMAQGPNSPSSSTTSPSPAAPSPPPRQQQSQAPVPRIIDTTPFPTTFVQADTANFKQVVQRLTGSDTPPPAQKPAKTHGHHHHHGGGVGPKKPAFKLYERRIGKNNLKMIAPLAGPSPRKAAPEVLSPSVLDFPSLALGSPVTPLLADPFNRSASASPGEQDEAEAAAIAQRGFFLHPSPRGVEPPRLLPLFPVTSPKMAPWPSQQ

SEQ ID NO: 455 - DNA, 1308 bp, Zea mays
atggatggaatggaacagacacaccggcctctgcaaacctgtgcgacgcatgtggcttttctcccgcccattcggtgcgtgctgggcggcgagactgatgatgatcaattggtcatgcacagcccatccagccagcagggagggacacgggcgggcatggctgctggtggcgctggtgcagctgttgcggcggtgctcacgacggccgtcgctgcagtcctcgttgcggtgttgacgacgacggtgtccggacaggacgacccagcgccagagccagcgccggcggcggcgtgcgcgcggcggcccgtggtgttcgcgttcggggactccaacacggacacgggcggcgtggcggctgggctggggcactactacccgctccccgagggccgcgtcttcttccgccgatccaccggccgcctctgcgacggacgcctcgtcatcgactacctctgtgagagcctgaacatgagctacctgagcccgtacctggaggccgtgggctccgacttcacgggcggcgccaacttcgccatctccggctcctccacgctgccccgcaacgtccccttcgcgctccacgtccaggtccagcagttcctgcacctgaagcagcgctcgctcgacctcgccgcccacggcgggacggctcccgtcgacgccgacggcttccggaacgcgctctacctcatcgacatcggccagaacgacctgtccgccgcattcgggagcggagcgccctacgacgacgtcgtccaccacaggatcccggctatcgtgtcagagataaaggacgctatcatgactctctactacaacggcgccaagaacttctgggtccacggcaccggccctctgggctgcttgccccagaagctcgccgcgccgaggcccgacgacagcgacctcgactacaacggctgcctcaagaccctcaacgacggcgcctacgagttcaacggtcagctgtgcgccgcctgcgacggcctcaggtcgcagctgcgcggcgccaccatcgtctacaccgacgtcttgctcgtcaagtacgacctcatcgccaaccacaccgcctacgggttcgaggagccgctcatggcgtgctgcggctacggcgggccgccctacaactacaacgccaacgtgagctgcctcggcccgggcttccgggtgtgcgaggacggcaccaagttcgtcagctgggacggcgtgcactacaccgacgccgcaaacgcccttgttgccgcgaagatcttctccggccaattctccacgccccaaatgcccttcgactacttctgccaggcatga

SEQ ID NO: 456 - protein, 435 aa, Zea mays
MDGMEQTHRPLQTCATHVAFLPPIRCVLGGETDDDQLVMHSPSSQQGGTRAGMAAGGAGAAVAAVLTTAVAAVLVAVLTTTVSGQDDPAPEPAPAAACARRPVVFAFGDSNTDTGGVAAGLGHYYPLPEGRVFFRRSTGRLCDGRLVIDYLCESLNMSYLSPYLEAVGSDFTGGANFAISGSSTLPRNVPFALHVQVQQFLHLKQRSLDLAAHGGTAPVDADGFRNALYLIDIGQNDLSAAFGSGAPYDDVVHHRIPAIVSEIKDAIMTLYYNGAKNFWVHGTGPLGCLPQKLAAPRPDDSDLDYNGCLKTLNDGAYEFNGQLCAACDGLRSQLRGATIVYTDVLLVKYDLIANHTAYGFEEPLMACCGYGGPPYNYNANVSCLGPGFRVCEDGTKFVSWDGVHYTDAANALVAAKIFSGQFSTPQMPFDYFCQA

SEQ ID NO: 457 - DNA, 1398 bp, Zea mays
atggacgacccgggcgcttccgccgaccccgccgcgcgccaccacctgtcgccgcagcagctcgggggccagccgccggtgccgcgctccccgaccccgctcgacctggcctccgccgccgcggcgtccgggtatcgccgcctctcgccgtcgctgcggccgccagcgcacccgcaggcgcgcctctcgtcgccctacggccagatcccctcgcccggcgccggcgcgcaccacgcgcgctcgctctcccagccgctcttcttctcgctcgactcgctcccgccgccgccctacgccgatctgggcgccgcgcccgccgtgcctccctccccgccgccgtcgacctccgacccgccgcctctcggcctgccgcccaggagggccggccaccgccgctcgcagagcgacatcccgttcggcttcgcgcagctcagcccgccgctgcccccgccggcgccggtcaagcgcgaggtcaccgctgcggccgacggctgcagatcggacggcggcggcggtgatgacgccgccctctacgacctcgtcaacgcgtacatggacctggacgggctggacccgctcaactcgtctgaggaccgccacgacgaccgcgacagtcgtgccagcggcacgcgcgcggggagcgcggccgagagcagcgagaacgaggcggagagccagtccacgtccgcggacaggaaggacgggggcaagtcccgccattgtcgcagcctgtccatagacagcttcatgggcaagctcagcttcgccgcaggggaggagtctccgaagctgccgctgccgtctcctggtggcagcctcaccaggagcgggagtggctcactggaaggtggtgctgtcgcgctgttcaatatggagtttaccaacggagagtttaccgactccgagaagaagaaaattatggcgaatgagcgacttgctgagatagctctgacggatcctaagagggtcaagaggattctggcgaatcggcagtcagcagccaggtcaaaggagcgcaagatgaggtacattcaggagcttgagcataaggtgcaagtgctgcagacagaggctacgacactctcagcacagttgacaatgctgcagagggactcagctggattggctactcagaacaacgagttgaaaataaggcttcaagcaatggagcaacaagcacagctgagagatgccctgaacgaagcgttaaccgccgaggtccaacgtctgaaactcgcgactggggaggtaaccgatggccggatgccgaagggcctacagcagcagatgaactcccagatgctccagatccagcagctgcaggttcagcagcaggcgccccaggcacagcagcagggccagcgacagcagcagcagcagcctcagaaatcggcatag

SEQ ID NO: 458 - protein, 465 aa, Zea mays
MDDPGASADPAARHHLSPQQLGGQPPVPRSPTPLDLASAAAASGYRRLSPSLRPPAHPQARLSSPYGQIPSPGAGAHHARSLSQPLFFSLDSLPPPPYADLGAAPAVPPSPPPSTSDPPPLGLPPRRAGHRRSQSDIPFGFAQLSPPLPPPAPVKREVTAAADGCRSDGGGGDDAALYDLVNAYMDLDGLDPLNSSEDRHDDRDSRASGTRAGSAAESSENEAESQSTSADRKDGGKSRHCRSLSIDSFMGKLSFAAGEESPKLPLPSPGGSLTRSGSGSLEGGAVALFNMEFTNGEFTDSEKKKIMANERLAEIALTDPKRVKRILANRQSAARSKERKMRYIQELEHKVQVLQTEATTLSAQLTMLQRDSAGLATQNNELKIRLQAMEQQAQLRDALNEALTAEVQRLKLATGEVTDGRMPKGLQQQMNSQMLQIQQLQVQQQAPQAQQQGQRQQQQQPQKSA

SEQ ID NO: 459 - DNA, 639 bp, Zea mays
atgagcgtgaccaagttcatcaagtgcgtcacggtgggcgacggcgcggtgggcaagacctgcatgctcatctgctacaccagcaacaagttccccacggactacatccccacggtgttcgacaacttcagcgccaacgtctccgtggacggcagcatcgtcaacctgggcctctgggacaccgcggggcaagaggactacagcaggctgcggccgctgagctacaggggcgcggacgtgttcgtgctggccttctccctgatcagcagggcgagctacgagaacgttcttaagaagtgggtgccagagcttcgcagattcgcgcccaacgtcccggtcgttcttgttgggaccaagttagatctccgcgaccacagagcctacctcgccgaccatcctggagcttcagcagtcaccacggcgcagggtgaggaactgaggaagcagatcggcgctgcggcctacatcgagtgcagttccaaaacccagcagaacgtcaagtctgtcttcgatacggccatcaaagtggtccttcagcccccacggaggagggaggcagtgcctgccaggaagaagaacaggcgtggctccggatgctctataatgaaccttgtgtgtggcagcacatgtgctgcttag

SEQ ID NO: 460 - protein, 212 aa, Zea mays
MSVTKFIKCVTVGDGAVGKTCMLICYTSNKFPTDYIPTVFDNFSANVSVDGSIVNLGLWDTAGQEDYSRLRPLSYRGADVFVLAFSLISRASYENVLKKWVPELRRFAPNVPVVLVGTKLDLRDHRAYLADHPGASAVTTAQGEELRKQIGAAAYIECSSKTQQNVKSVFDTAIKVVLQPPRRREAVPARKKNRRGSGCSIMNLVCGSTCAA

SEQ ID NO: 461 - DNA, 4236 bp, Zea mays
atgcatctggacggcgtcgacgacgagctcggaggcggcagctgcgccccctcccccgcgcgctttgagctccaagaggatccttccttctggaaggacaacaatgtgcaggttgcgatccgtatccggccgctgagcggcagtgaggtgtcgatgcaggggcagaagcggtgcgtcaggcaggatagtagccagagccttacctggattggacaccccgagtccaggttcactttcgatcttgtcgctgacgaacatgtcacgcaggagggcatgttcaatgttgccggggtgcccatggtggagaactgcatagctggctataacagctgcatgtttgcttacgggcagactggaagcggaaaaacacatacaatgcttggtgacatagaaaatggaacacggaggaacaatgtgaattgtggtataactcctcgagtgtttgagcatctctttgaaaaagaattaaggagagatgaaaagctcatgtttacttgtaaatgctcatttttggagatttataatgagcagattctggatctgctcaacccaaattctgtaaacttgcagataagggaggatgccagaaagggtatacatgttgagaatttgacggaacatgaaatctccaatgctcgagaagcgctgcaacaacttattgagggagcagcaaacagaaaggtagcagccaccaatatgaaccgagcaagtagccgctctcatagtgttttcacctgccttatagaaagtaagtgggagtcacaaggtatcaagcaccaccgcttttctcgactcaaccttgttgaccttgcgggctcagagaggcaaaagagctcaggtgctgaaggggagcgattgaaggaagctaccaacatcaacaaatcactatcaactttgggacttgtcattacgaacctaattgctgtgtcaaacaaaaagtcacagcatgttccatacagagattcaaaattaacattcctcctccagcttccattccattttgaaagttacacatttgatatttctcgctttctatccagttgtgctgctgagacattaagcacattgaaattcgcgcaacgagctaaatatataaggaataatgctataattaatgaggatgcttctggtgatgttcttagcatgcgtttacagatccagaaccttaagattatcattcatcttaaacttacctgcttttgcagaaaagtaatcagccgtttgcaaggacaattgggttctgataaaacagaaagcattgcctctcatgggtttgtctgcgagtcccctagcacattcaaatgggatcagggtcatggcatgttcactccacttacttttgataaaagggctacacagaggaacgattgtgatgctgcccttgtcgctgcttttaggagggaacaagagaaggaagcacaattgaaggcagtaatagatgcaaagcagactgctgaacagctggtagctcaaaagacagaagaggtaagaagtttcaagatgaggcttaagtttcgtgaagaacggatcaaaagattggagcaggttgcttcagggaagttatctgctgaagcacatcttttgcaagagaaggaaaaccttgtaaaggaattagaggtcctgcggggtcaattagatcgtaatccagaaattacaaaatttgcaatggagaatctacaattaaaggaagagctacgaaggttgcagtcatttgttgatgaaggtgaacgagaaatgatgcatgagcaaatcattgttttacaagataagctgcttgaggcacttgactggaagcttatgaatgagaaggaacctattaacaagggtctctcattatttggggagtcagctggcgatgaggaaaatgagtttcttcgtttgcaggctattcaaaatgagagagaaattgagtcgttgcgtaaaaaaatgacattctgccttgaagcaaaagataatcttgaaaggcatgtcaatgagttgaccacagagttggagcttacaaagaaacacaacaacacatataaagagttcaaggctgcccagctccaggagcaaggagaagcagatttacataacttgtctgacgctcagatggaacttaagactttggttgatgcaatagcttctgcgagtcaacgggaggcagaagctcatgaaactgctatcggtttggccaaagagaatgaagaattgaggctgcagcttaaggttttgattgaggataacaagagattggttgagctctatgaacacactgttgtcaatgttgaggcaaatcaagatggaaaccctgtagatgatctgttgaatgcccaaccagcagccacatcagatttccatgcacataactcatctagtgtggcacaggagtctaagatagtagacgaaaaatgcaccaatgaggacaatttctcaagagttacatctgttgaattgcgtcttcagctggaggagatgcatgaggaaaatgatagacttatggggttgtatgagaaagctatgcaggaaagagatgaattcaaacggaaaattttagagcaaagcgactctgaagctgtaaaacatattcagttggacgagaaagatgtcgaaatgagtgaagcagctgagaatcctgaagtgaaacatattcatgactccacaattgcagctttgaaagaagtgctgcagattgttcggagtaagttggagcttgtccaagataaggttgtgtctgctcaggatgcagtaaaatattttaaggcactcgaaatagctagtggtaaggccgaagaactttctgcaagaattgagcttcagcgtctaggtgcgcagcgtggtcaggaagaaatcactttcctgaagtctgtgctatcagaatcacagaagaagaaaaatgcttttgaaggcaagtatttcttgcctgcagcatcatgttggaacttggttttgaagaccaaaagtcttgcggagtccaagtttgatgccagctttggatcaatgaatcagaagaaagaacagttgaatcatctccaaactcgcaaaattgaactatctgctgcaagaacgagagcacgtgaatctgaaactgagttgaaaagcaaaattgatggccttaaagcgaaacttcgcgctcatgaagctcaaagaaaggaggaagaaaaggtcctgtttgctattgataacctggatacttccactacactaatgcataaacccaagaactatggcaaggcaaccgacctgctgaaatctgaggaggatcggatgaagcttctgtgtgaactacagaaggcccgcgaacagcgctccatggtacataaggaaataagaagcatgaatgagtgtgattatattgatcgtgagattggagtccttgaagcagaaatagaggattcctgcatctccatactggaaactgacattgagaagtttgtccgtgacaacactttagcagagatttgggagggtagcgcaaaggatctggaggcattgctggtcgattaccaagactgtgttttccaagtcaacttgaaggaggaagagatcaaggtgtgcagtgagtccttgcagtatcaagccagggacatggataaacttcagtcgaagctgaaccaagcgatccgggagctgggtgagcttctgcaagatagaagaagcctaaccgcttgcagtctggatgaacccacgctgcccgttggtgaaaaggtgtgccagccggcggcaacctgtgcggggagcgccaagggctccaggaaagaatcggcggcgggctcgcgatcgggaaggggagcggggcgcatgcgcgagcactggcacggcgacggcgacggcgacggcgaggacgagcatgagccccagccggggtgcggggagggcgcggggcaggcggcggcgaactgcgcggcggtgtgctgctgctgcccgctggcgctgctcgacgtgctgctgctcgtcaccgtccggctccccgcgggcgtcatgcggcgggtgaggaggaggcgccggcgccgccgcggccacggaggtgccggagccaaccggaagaggccggcgcccgcgtcgccttcgggaagcagcggcaaggcgatgatcggagcggcgacgctagacatcgacgaggaggcgcgcggcgaggtggagtcggcggcggcggcggagctggagcgcgagatcatgagctcgcacttctacggcgccggcttctggcgcagcgtctcctccaactccagctcctcgtccaggcgctaccaatag

SEQ ID NO: 462 - protein, 1411 aa, Zea mays
MHLDGVDDELGGGSCAPSPARFELQEDPSFWKDNNVQVAIRIRPLSGSEVSMQGQKRCVRQDSSQSLTWIGHPESRFTFDLVADEHVTQEGMFNVAGVPMVENCIAGYNSCMFAYGQTGSGKTHTMLGDIENGTRRNNVNCGITPRVFEHLFEKELRRDEKLMFTCKCSFLEIYNEQILDLLNPNSVNLQIREDARKGIHVENLTEHEISNAREALQQLIEGAANRKVAATNMNRASSRSHSVFTCLIESKWESQGIKHHRFSRLNLVDLAGSERQKSSGAEGERLKEATNINKSLSTLGLVITNLIAVSNKKSQHVPYRDSKLTFLLQLPFHFESYTFDISRFLSSCAAETLSTLKFAQRAKYIRNNAIINEDASGDVLSMRLQIQNLKIIIHLKLTCFCRKVISRLQGQLGSDKTESIASHGFVCESPSTFKWDQGHGMFTPLTFDKRATQRNDCDAALVAAFRREQEKEAQLKAVIDAKQTAEQLVAQKTEEVRSFKMRLKFREERIKRLEQVASGKLSAEAHLLQEKENLVKELEVLRGQLDRNPEITKFAMENLQLKEELRRLQSFVDEGEREMMHEQIIVLQDKLLEALDWKLMNEKEPINKGLSLFGESAGDEENEFLRLQAIQNEREIESLRKKMTFCLEAKDNLERHVNELTTELELTKKHNNTYKEFKAAQLQEQGEADLHNLSDAQMELKTLVDAIASASQREAEAHETAIGLAKENEELRLQLKVLIEDNKRLVELYEHTVVNVEANQDGNPVDDLLNAQPAATSDFHAHNSSSVAQESKIVDEKCTNEDNFSRVTSVELRLQLEEMHEENDRLMGLYEKAMQERDEFKRKILEQSDSEAVKHIQLDEKDVEMSEAAENPEVKHIHDSTIAALKEVLQIVRSKLELVQDKVVSAQDAVKYFKALEIASGKAEELSARIELQRLGAQRGQEEITFLKSVLSESQKKKNAFEGKYFLPAASCWNLVLKTKSLAESKFDASFGSMNQKKEQLNHLQTRKIELSAARTRARESETELKSKIDGLKAKLRAHEAQRKEEEKVLFAIDNLDTSTTLMHKPKNYGKATDLLKSEEDRMKLLCELQKAREQRSMVHKEIRSMNECDYIDREIGVLEAEIEDSCISILETDIEKFVRDNTLAEIWEGSAKDLEALLVDYQDCVFQVNLKEEEIKVCSESLQYQARDMDKLQSKLNQAIRELGELLQDRRSLTACSLDEPTLPVGEKVCQPAATCAGSAKGSRKESAAGSRSGRGAGRMREHWHGDGDGDGEDEHEPQPGCGEGAGQAAANCAAVCCCCPLALLDVLLLVTVRLPAGVMRRVRRRRRRRRGHGGAGANRKRPAPASPSGSSGKAMIGAATLDIDEEARGEVESAAAAELEREIMSSHFYGAGFWRSVSSNSSSSSRRYQ

SEQ ID NO: 463 - DNA, 1293 bp, Zea mays
aattgatgagcaatgcttttttataatgccaactttgtacaaaaaagcaggcttaaacaatggcgggaaggcgagaggagtggggtggagaggtactgcagcggcaacgggaggaggaggaggaggaggatgaggaagagcaagaggatgaggatttcatcgacatggacctgagccctgccgcggccaggacgcccgtggcgcatgagttcgagttcatgtcggcgccgctggaccggtggggcgagaccctggctgcgtcgccggcagacgagctcttctacaaggggaagctgctgccgctgcacctgccgccgcgcatccagatggtggaggagctcctggacggccggggccggggccgcggcagggacagggacagggacagggagctcctgttccgcggcgtcagcagcacggccccggcgacgccgtacgagtcgtgcaacgcgtcgccggccaactcgtcgtgctacggctacggctacgccagcggggagctcaacgtcgaggagtacttccaggagtacgcggccggcctggcgctggcggaggacgccgccgcggcgccgaggaagccgtggtccaggaggctacggttcatgaggcagctcaacctgggcctccggctcagggcgtccaaggcgtacctcaagaccatcttgttcgcggccaggccggggagcccggccgacgagaagagcggtcttggcgccgtcgccgcgaggggcgcgcgggaggagatcgccgcccatggccacggccacctcagggcgtggacaaagaacccgttcgcccagaccagaatgaacaccaggtgcgtcgcctctcacggtggcaccagccgcgccgctgccgctgccgctggagggcggtgcaaggaacgcgagcacggggcgcacaggcgctccttctccagcgtcatcgtccgctactctccgtcgaacaagacgtcccccgtccccgcgctgccgccgtcctcgtgctcctcctcatcggcctcctcgtcggtccggacctcgagcgggtcgtccgacggcggcgtggggccgacgctgaggaggagcagcagcgcgagctcggaggtggagaaccccgtccaggggctcatcgcctactgcaagaggtcccaacagctggcctccgtccggaagagcgccagcgacgccggcttccgcttcctgtcgtcgtccgcgtccaggatcgccgccgagtccgagtccgagtccgacggcctcgacgagctcaccgagatctgcagaggatgaacccagctttcttgtacaaagttgg

SEQ ID NO: 464 - protein, 402 aa, Zea mays
MAGRREEWGGEVLQRQREEEEEEDEEEQEDEDFIDMDLSPAAARTPVAHEFEFMSAPLDRWGETLAASPADELFYKGKLLPLHLPPRIQMVEELLDGRGRGRGRDRDRDRELLFRGVSSTAPATPYESCNASPANSSCYGYGYASGELNVEEYFQEYAAGLALAEDAAAAPRKPWSRRLRFMRQLNLGLRLRASKAYLKTILFAARPGSPADEKSGLGAVAARGAREEIAAHGHGHLRAWTKNPFAQTRMNTRCVASHGGTSRAAAAAAGGRCKEREHGAHRRSFSSVIVRYSPSNKTSPVPALPPSSCSSSSASSSVRTSSGSSDGGVGPTLRRSSSASSEVENPVQGLIAYCKRSQQLASVRKSASDAGFRFLSSSASRIAAESESESDGLDELTEICRG

SEQ ID NO: 465 - DNA, 870 bp, Zea mays
caaattgatgagcaatgcttttttataatgccaactttgtacaaaaaagcaggcttaaacaatggttactagcatccgcgtcatagttggaatcataggatctgtagtctgtgtgctcctctacgcggttccagtgctgacgtttaagagagtggtgaaggaggccagcgttggggagttctcgtgcgtgccatacatcctcgcccttttcagcgccttcacctggggctggtacggcttccccatcgtcagtgacgggtgggagaacctgtcgctcttcggcacgtgcgccgtcggagtgctcttcgaagcttcgttcgtcgtcgtatacgtgtggtttgcgccaagagacaaaaagaaatctgtcgtcctaatggtgtctctggttgtggcaacgctctgcgtcatcgtatccttgtcaagcttcgtgttccacacgcaccatatgcgcaagcaatttgttggtagcattggtatagtcacctccatatccatgtacagcgctccgcttgtagccgtgaagcaagtcatcctgaccaagagcgtggagttcatgcctttctacctgtcgttgttctccttgctgaccagttttacatggatgctgtacggcatcctaggaagggatccctatcttacggcaccaaacggcgccgggtgtttaactggacttcttcagatcgctgtgtactgcatttacagcagatgcaatcgaccgccgaaagcagtcaatggtgcgacaactagccgtgaagatgcaaatgattgcaaggtttgaacccagctttcttgtacaaagttggcattataagaaagcattgcttatcaatttgttgcaacgaacaggtcactatcagtcaaaataaaatc

SEQ ID NO: 466 - protein, 238 aa, Zea mays
MVTSIRVIVGIIGSVVCVLLYAVPVLTFKRVVKEASVGEFSCVPYILALFSAFTWGWYGFPIVSDGWENLSLFGTCAVGVLFEASFVVVYVWFAPRDKKKSVVLMVSLVVATLCVIVSLSSFVFHTHHMRKQFVGSIGIVTSISMYSAPLVAVKQVILTKSVEFMPFYLSLFSLLTSFTWMLYGILGRDPYLTAPNGAGCLTGLLQIAVYCIYSRCNRPPKAVNGATTSREDANDCKV

SEQ ID NO: 467 - DNA, 1462 bp, Zea mays
gattttattttgactgatagtgacctgttcgttgcaacaaattgatgagcaatgcttttttataatgccaactttgtacaaaaaagcaggcttaaacaatgagcatggcgttctcctgcgcgggcgcgcgcctccacggtcgcaccggcgtcggcggcgccaaatgccgtcccggcgcggctctgctcgggcggcggggcacctgcttccgtccgaccgcctggaggtggagcaccgccaggggaatccgcgctgacctcccgccaccgccgcgggcgagcgcggatggcgccgccacctccggcccggacgtcgtcgtccccgaagcgggggacgctactgaggaggtggccgcggttgttcaacctgttgtgctcccggagaagcttgatgtcgatgatggtggaaatggcaagctccctcccgccgccggcggcggtggggacggcgagaatggcggcggtagcggcggcgggggtgacggtgacgaggaggaggatgagttcggacccatactcagcttcgaccaggtggtccaggaggcggagaagagaggggttagtctgcccagtttgcccacggacatagttgaggcggccaagagcgttgggattcagaaactgctgctgctgagatatctggacatgcaggcgtcggcttggcccttggggcctgcaattaggtcctgctcgcttctccggaataggatgctggttgatcctgcattcctcttcaaaattggcactgagatagtcatcgatacatgttgtgcgacatttgctgaggttcagaagagaggggaggagttttggtcagaatttgagttgtatgctgcagatatgttggtaggagtagttgttaatgtagctttagtcggcatgttagcgccatatgctcgatttggtagcagatctgcatcagaaggtctccttgggcgcgttaggcatgcttatgatgccctcccaagcagcgtttttgaagctgaaaggccaggatacaaattttctgtgcagcaacggataggaacatactttttcaagggaatattgtatggttctgttggattcttttgtggtcttgtgggacaagggattgctaatttgataatgacagccaaacggagtgttaagaagtcagatgatgatgtacctgttccacctcttctcaagacttctgctttgtggggtgcattccttgctgtttcttccaacacacggtaccagattattaatggattagagcgcctggttgaggcttcacctgttgggaagcgtgtcccggctgcttctttggcattcactgttggtgtgaggtttgccaataacgtgtacggagggatgcagtttgttgactgggcaagaatgagtggctgccaatgaacccagctttcttgtacaaagttggcattataagaaagcattgcttatcaatttgttgcaacgaacaggtcactatcagtcaa

SEQ ID NO: 468 - protein, 426 aa, Zea mays
MSMAFSCAGARLHGRTGVGGAKCRPGAALLGRRGTCFRPTAWRWSTARGIRADLPPPPRASADGAATSGPDVVVPEAGDATEEVAAVVQPVVLPEKLDVDDGGNGKLPPAAGGGGDGENGGGSGGGGDGDEEEDEFGPILSFDQVVQEAEKRGVSLPSLPTDIVEAAKSVGIQKLLLLRYLDMQASAWPLGPAIRSCSLLRNRMLVDPAFLFKIGTEIVIDTCCATFAEVQKRGEEFWSEFELYAADMLVGVVVNVALVGMLAPYARFGSRSASEGLLGRVRHAYDALPSSVFEAERPGYKFSVQQRIGTYFFKGILYGSVGFFCGLVGQGIANLIMTAKRSVKKSDDDVPVPPLLKTSALWGAFLAVSSNTRYQIINGLERLVEASPVGKRVPAASLAFTVGVRFANNVYGGMQFVDWARMSGCQ

SEQ ID NO: 469 - DNA, 1307 bp, Zea mays
gcttttttataatgccaactttgtacaaaaaagcaggcttaaacaatgggccaaagttatgtgactgctgggaagcacgaggagactccagaggcttttccacttcctagaggcgtcgcaatagtgcgggcagatgctggatgggctcactgtgttgcaataacagatgaaggtgatgtttatacatggggttggaaagagtgtgttccaactggaagggttattggagaccaatcttcagttggaaccaaggagaaggatgaaagacaaatggcaatggccactgaccaagtgagccccaggtcgcaggtgtctaggacaagcagcggggcagcatctggtccttctgaaagcagaggcactgatgatagcacaaagcgacgaaggttgtcttcagcaaaacatggccctgagagctcgacatccagtgacgaaagtctttccgcacccccttgtgttgtgacatttaatacaggagtgaaaatagtgtctgtagctgctggtggtcgtcatacattagcactgtcagatttaggtcaggtatggggttggggatatggaggagaagggcaactaggtctgggctctagaatccgaactgtttcttctccccatcctgtaccgtgcattgaatcagcactatacagcaaggatcgcccatcagctatgaaaggtaacaaggctgctgaaggacatgtcagtaaagtcttgggaaattgtgtgagggccattgcttgtggaggtcgtcacagtgctgcagtaacagattcaggagctcttcttacatttgggtgggggctgtatggacagtgtggacaagggaatacagatgatgttttaagtccaacgtgtgtatcgtctatcctgggatccaagatgcaagacgttgctgcgggtctgtggcacactgtatgtacatccgtagatggtgatgtttattcctttggaggaaaccagtttgggcagcttggcactggttctgatcaggctgagactgttccaaaattggtagatgctaccagcctagagaataagaatgccagatctgtttcttgtggagctcgccatagtgctattataacagatgaaggcgaggtattctgctggggatggaacaagtacggccagcttggccttggcgactcaatggacaggaacgtgccttgcagtgttcctgtggacgcttaccaccccctaaacgtgtcctgtggctggtggcacaccttggtgctcgcggactcgcctacttgaacccagctttcttgtacaaagttggcattataagaaagcattgcttatcaatttgt

SEQ ID NO: 470 - protein, 401 aa, Zea mays
MGQSYVTAGKHEETPEAFPLPRGVAIVRADAGWAHCVAITDEGDVYTWGWKECVPTGRVIGDQSSVGTKEKDERQMAMATDQVSPRSQVSRTSSGAASGPSESRGTDDSTKRRRLSSAKHGPESSTSSDESLSAPPCVVTFNTGVKIVSVAAGGRHTLALSDLGQVWGWGYGGEGQLGLGSRIRTVSSPHPVPCIESALYSKDRPSAMKGNKAAEGHVSKVLGNCVRAIACGGRHSAAVTDSGALLTFGWGLYGQCGQGNTDDVLSPTCVSSILGSKMQDVAAGLWHTVCTSVDGDVYSFGGNQFGQLGTGSDQAETVPKLVDATSLENKNARSVSCGARHSAIITDEGEVFCWGWNKYGQLGLGDSMDRNVPCSVPVDAYHPLNVSCGWWHTLVLADSPT

SEQ ID NO: 471 - DNA, 2448 bp, Zea mays
atgtacgtggtcaagagggacggccgccaggagacggtgcacttcgacaagatcacggcgcgcctcaagaagctcagctacggcctcagccaggaccactgcgacccggtgctcgtcgcgcagaaggtctgtgcgggggtctacaagggcgtcaccaccagccagctcgacgagctcgccgccgagaccgccgcggccatgaccgcgtcccaccccgactacgcctcgctggcggcgaggattgctgtgtcgaacctgcacaagaacacaaagaagtccttctcggagacgattaaggacatgtacatgcacttcaacaagagatccgggctgatggcccctcttgtcgctgaagatgtttatgaaatcatcatgaagaatgctgctcgcttggacagtgagataatttatgatagggatttcgactacgactactttggcttcaaaactctggagaggtcttacctgttgaagcttgatggtaaggtcgttgaaaggccgcagcacatgttaatgagggtttcactggggatacacaaggaagacatcgagtctgccatcaggacgtaccatctgatgtcccagcgctggtttactcatgcttcaccgacgcttttcaatgctggcacgccgaggccccaattaagcagctgttttcttatatgcatgaaagatgacagcattgagggaatctatgaaaccctgaaagagtgtgctgtaataagcaaatctgctggaggaattggtgtctcagttcataatatccgtgctactgggagttatattcgaggaacaaatggatcatcaaatggaattgttcctatgttacgtgtctttaatgatactgctcgctatgttgatcagggtggtggcaaaagaaagggtgcatttgctgtatacttggagccttggcatgctgatatttttgagttccttgatctgagaaagaaccatgggaaggaggaaaatcgtgcaagggatcttttctatgcgctatgggttcctgatttattcatgcaaagagtccagaataatggagaatggtcattattttgccctaatgaagctccagggttggctgattcctggggtgaggagtttgataatttgtacaagaaatatgagagccaaggcaaggcaaagaaagttgttccggcacagaccctttggtttgacattttgaaggcacagatagagactggtacaccatatatgctttataaggatacttgcaataggaaaagtaaccagcagaatctgggcacaattaaatcgtcaaacctgtgcactgaaataattgagtttacaagccctactgagaccgctgtctgcaacctagcatctattgctttacctcgttttgttcgggaaaaggatgttccgttggagtcccatccatctaagcttgtgggtagcagtgattcaaaaaatagatattttgattttgagaagctagctgaggttacctcaactgttacttacaatcttaacaaaattatcgatattaattactatcctgttgagacagcaaagaggtcaaacatgcgtcacaggccaattggcataggtgttcaaggcctggcagatactttcatattactgggcatgccgtttgattcaccagaggctcaacagttgaataaggatatattcgaaactatctactatcatgctctgaaagcttctgctgaacttgctgctaaagaaggtccctatgaaacatatgaagggagccctgtcagcaagggcattctccaacctgacatgtgggatgtagtgccatctaacagatggaactggccatctctaagggagaccatttcaaaagttgggataagaaattctcttcttgttgctccaatgcccactgcttccactagtcagattcttggcaacaatgagtgttttgaaccctacacgtctaatatatacagtcgacgtgttctaagtggggaatttgttgtggtcaacaagcatcttcttcatgatctgactgaaatgggcatttggactcctactttgaaaaaccagataatatacgacgacggttctgtccagaagatagcagaaatcccggacgatcttaaagcaatctacaaaactgtttgggagatcaagcagaaaactttagttgacatggcggtcgaccgcggatgctacatcgaccaaagccagagcctcaatgtccacatggagcaagcaaactttgggaagctgacgtctcttcacttccatgcttggtccaagggcctgaaaactggaatgtactatctacgcacacgagctgctgctgatgcgatcaagttcacagtggataccacgcttctgaaggagaatgggaacggggttagcgatggaaagcccgcggaggaagacgtagacgctaaaatggcacagatggtctgttctttgaacaaccgggaagagtgcctggcgtgtggaagctag

SEQ ID NO: 472 - protein, 815 aa, Zea mays
MYVVKRDGRQETVHFDKITARLKKLSYGLSQDHCDPVLVAQKVCAGVYKGVTTSQLDELAAETAAAMTASHPDYASLAARIAVSNLHKNTKKSFSETIKDMYMHFNKRSGLMAPLVAEDVYEIIMKNAARLDSEIIYDRDFDYDYFGFKTLERSYLLKLDGKVVERPQHMLMRVSLGIHKEDIESAIRTYHLMSQRWFTHASPTLFNAGTPRPQLSSCFLICMKDDSIEGIYETLKECAVISKSAGGIGVSVHNIRATGSYIRGTNGSSNGIVPMLRVFNDTARYVDQGGGKRKGAFAVYLEPWHADIFEFLDLRKNHGKEENRARDLFYALWVPDLFMQRVQNNGEWSLFCPNEAPGLADSWGEEFDNLYKKYESQGKAKKVVPAQTLWFDILKAQIETGTPYMLYKDTCNRKSNQQNLGTIKSSNLCTEIIEFTSPTETAVCNLASIALPRFVREKDVPLESHPSKLVGSSDSKNRYFDFEKLAEVTSTVTYNLNKIIDINYYPVETAKRSNMRHRPIGIGVQGLADTFILLGMPFDSPEAQQLNKDIFETIYYHALKASAELAAKEGPYETYEGSPVSKGILQPDMWDVVPSNRWNWPSLRETISKVGIRNSLLVAPMPTASTSQILGNNECFEPYTSNIYSRRVLSGEFVVVNKHLLHDLTEMGIWTPTLKNQIIYDDGSVQKIAEIPDDLKAIYKTVWEIKQKTLVDMAVDRGCYIDQSQSLNVHMEQANFGKLTSLHFHAWSKGLKTGMYYLRTRAAADAIKFTVDTTLLKENGNGVSDGKPAEEDVDAKMAQMVCSLNNREECLACGS

SEQ ID NO: 473 - DNA, 948 bp, Zea mays
atgatgaatacccgagcctgtggcagcggcagtggcggcaggaacgaccagaccatgatgggcttctccgagcatccgaagccggcggcgtcggggcaggcgcagccgtccccgccgtcgtcgccgagcgagcgtccgccagcaggccgcgggcgccggcgcgcgcaggagcccgggcggttcctcggcgtgcggcgccggccgtggggccggtacgcggcggagatacgcgaccccacgaccaaggagcggcattggctgggcacgttcgacaccgcgcaggaggcggcgctcgcctacgaccgcgcggcgctgtccatgaagggcgcgcaggcgcgcaccaacttcgtctacacgcacgccgcgtacaactacccgcccttcctggcgccgttccaccacccgtcgtcggtgcagcagcagcattacggcgccgcgccgcacgttggctcgtacggccaccaccactaccaccaccagggctcgtcagcagctgtcgtcggcgcgtcctcgggcgagtgctcgtcggcgttgccgcccgtggagcgcgccgacggcacgctgctgctggaccgcggcggcggcggcgggcaccaccaccaccaccaccaccaccccgagttcctgttcgcgagcgcggacgacaactccgggtacctgagcagcgtggtcccagagagctgcctccggccgcggagcagcgcggcggcggtggaggacctgcggcggtactcggacgcggacgcctacgggatgggcgtggggctccgggaggacgtggacgacctcgcgcagatggtggccgggttctggggcggcggcgccggcgacgcggaccagctgtgcggcggagggttcccgtcgggcggagccggggacagcatggccgtggcgtcgtcgcaggggtcgtccgacggctactcgcccttcagcttcctctcccactga

SEQ ID NO: 474 - protein, 315 aa, Zea mays
MMNTRACGSGSGGRNDQTMMGFSEHPKPAASGQAQPSPPSSPSERPPAGRGRRRAQEPGRFLGVRRRPWGRYAAEIRDPTTKERHWLGTFDTAQEAALAYDRAALSMKGAQARTNFVYTHAAYNYPPFLAPFHHPSSVQQQHYGAAPHVGSYGHHHYHHQGSSAAVVGASSGECSSALPPVERADGTLLLDRGGGGGHHHHHHHHPEFLFASADDNSGYLSSVVPESCLRPRSSAAAVEDLRRYSDADAYGMGVGLREDVDDLAQMVAGFWGGGAGDADQLCGGGFPSGGAGDSMAVASSQGSSDGYSPFSFLSH

SEQ ID NO: 475 - DNA, 883 bp, Zea mays
ataatgattttattttgactgatagtgacctgttcgttgcaacaaattgatgagcaatgcttttttataatgccaactttgtacaaaaaagcaggcttaaacaatggcgccccgggtggcggacaagtcgcctctaccgccggccaccggcctggggctgggcgttggcggaggagtcggaggcgtgggcatgggcccgcactacagaggcgtgaggaagcgtccatggggacgctacgccgccgagatccgcgaccctgccaagaaaagccgcgtgtggctcggcacgtacgacacggccgaggaggccgccaaggcgtacgattccgccgcccgcgagttccgaggcgccaaggccaagacgaacttcccgttcccctcccagtgctccgtcgcctccggtgctgccggtagcgccagtagcaacagcaccgtggattcgagcggtggcggtagcggctgtggcatccaggcgcctatgcaggccatgccgcttcctccggctctcgatctcgacctcttccatcgggcggccgccgtgaacgcagtctccaccggcatgcggtttccgttcaagggctatcctgtcgcctgcccgacgccacagcagtactttttctacgagcaggcggctgccgcggcatccggataccggatgctcaaggtcgctccaccggccgtgactgtggccgcggttgcgcagagcgactccgactcgtcgtctgtggttgatcactccccttcgcctcccgcggtgacggcaaacaaggtgggcttcgaactggatctgaactggcccccgccggcagagaactagacccagctttcttgtacaaagttggcattataagaaagcattgcttatcaatttgttgcaacgaac

SEQ ID NO: 476 - protein, 237 aa, Zea mays
MAPRVADKSPLPPATGLGLGVGGGVGGVGMGPHYRGVRKRPWGRYAAEIRDPAKKSRVWLGTYDTAEEAAKAYDSAAREFRGAKAKTNFPFPSQCSVASGAAGSASSNSTVDSSGGGSGCGIQAPMQAMPLPPALDLDLFHRAAAVNAVSTGMRFPFKGYPVACPTPQQYFFYEQAAAAASGYRMLKVAPPAVTVAAVAQSDSDSSSVVDHSPSPPAVTANKVGFELDLNWPPPAEN

SEQ ID NO: 477 - DNA, 1021 bp, Zea mays
caacaaattgatgagcaatgcttttttataatgccaactttgtacaaaaaagcaggcttaaacaatggccgggatcgtggtggtgttcgacttcgacaagacgatcatcgacgtggacagcgacaactgggtggtggacagcctcggcctcaccgacctgttcgagcgcctcctccccaccacgccctggaacacgctcatggacacgatgatgggggggctgcacgcgcggggcaggacgctggccgaggtgaccgaggcgctcagggcggcgcccatcgacccgcgcgtgcccgccgccgtcagggccgcgcacgcgctcggctgcgacctgcgcgtgctcagcgacgccaacgccttcttcatccacaccgtcctggaccaccacggcctgctcgcctgcttctcccaggtcaacaccagccccagccgcgtcgacgcccacggccgactccgcatcgggccctgccacgacccgcgcgcggcgccgcacggctgcggcgtcggcacctgcccgcccaacatgtgcaagggcctcgtgctggaccgcatcctccgcgaggccgaggccgaggccgagaccgcatcctccgcgaagccgcgcgtcatctacctgggcgacggccgcggcgactactgcccggcgctgcggctggcgcgcacagacttcgtgatgccccgcaggggttaccccgtctgggacctcatctgcgaggaccccgcgcgcctgcaggcggaggtgcacccctggaccgacggcgccgagctggaggagacgctgctgcgcctcgtgcggagggcggtcgtggaggacgccgcgctgccgccgccgccgccgccgccgctcgactgcaagctcgagtccatgcccgtcgccgcgcaggacagtatgcccatcgtgccgctgggcgtcaagaactgatactgtctctggttcagaattgaacccagctttcttgtacaaagttggcattataagaaagcattgcttatcaatttgttgcaacgaacaggtcactat

SEQ ID NO: 478 - protein, 304 aa, Zea mays
MPTLYKKAGLNNGRDRGGVRLRQDDHRRGQRQLGGGQPRPHRPVRAPPPHHALEHAHGHDDGGAARAGQDAGRGDRGAQGGAHRPARARRRQGRARARLRPARAQRRQRLLHPHRPGPPRPARLLLPGQHQPQPRRRPRPTPHRALPRPARGAARLRRRHLPAQHVQGPRAGPHPPRGRGRGRDRILREAARHLPGRRPRRLLPGAAAGAHRLRDAPQGLPRLGPHLRGPRAPAGGGAPLDRRRRAGGDAAAPRAEGGRGGRRAAAAAAAAARLQARVHARRRAGQYAHRAAGRQELILSLVQN

SEQ ID NO: 479 - DNA, 978 bp, Zea mays
atggacgtcggcgcggagctgcgcgaggcccaccgcctgacgggccacgccgaccgcgtgtgggcgctcgcttggaaccccgccccgggccccggctccagccccgttctcgcctcctgcagcggcgacaagaccgtccggatctggaagcgcgcccctgacggcgcctggcagtgctcggatgtgctggaagacacgcacaaccgcacggtgaggtcctgcgcctggtcccccaacgggaagctgctcgccaccgcgagcttcgacgccaccacggcagtgtgggagtacaacggcgccgactttgagtgcgtcgccacgctggaggggcacgacaacgaggtgaagagcgtgtcatggagcccgtctgggtcactgctcgccacatgcagccgggacaagatggtgtggatatgggaggtgctgccagggaacgagttcgagtgtgtctcggtgctgccgggccacacgcaggacgtcaagatggtgcagtggcacccaattcttgacattttggtctccgtcagctatgataattccatcagggtctgggctggtgatggagacgatgagtggcactgtgtgcagacactaactgaagccaataactgtggtcattcatcaacagtatgggcattatcctttaaccttaaaggtgacaggatggtcacatgcagtgatgaccaaacgttgaaaatatgggacacaagtgctgatttgtctcaaccaaaaactggcgaagtccacaagaagctccaatctggctcatgcacaagtccatctgattttgctgcggatgccaggctgacctttaacaacgctatggcttataatccttgggggcatgctgtgcacgacatgaccattcagttgaacaagatgtttgagagtcgatggaggccaaatgagaagaaactagcttttgctgccactgagaaatttgaagaggaagacaatacctcctatggactgcagtga

SEQ ID NO: 480 - protein, 325 aa, Zea mays
MDVGAELREAHRLTGHADRVWALAWNPAPGPGSSPVLASCSGDKTVRIWKRAPDGAWQCSDVLEDTHNRTVRSCAWSPNGKLLATASFDATTAVWEYNGADFECVATLEGHDNEVKSVSWSPSGSLLATCSRDKMVWIWEVLPGNEFECVSVLPGHTQDVKMVQWHPILDILVSVSYDNSIRVWAGDGDDEWHCVQTLTEANNCGHSSTVWALSFNLKGDRMVTCSDDQTLKIWDTSADLSQPKTGEVHKKLQSGSCTSPSDFAADARLTFNNAMAYNPWGHAVHDMTIQLNKMFESRWRPNEKKLAFAATEKFEEEDNTSYGLQ

SEQ ID NO: 481 - DNA, 1447 bp, Zea mays
cccaaataatgattttattttgactgatagtgacctgttcgttgcaacaaattgatgagcaatgcttttttataatgccaactttgtacaaaaaagcaggcttaaacaatgacggaggtggcgctcctccggggcccgaccaacctcgcttccaccgtaagccgcgcctccgtctcctccccctcctcaacgctgtgctatttagccaatgccgacagcgacgtgctcctaagaagcggtagccccgagcgcactgcgggatctgctaggagtcggcgactccttgaacagcgcgggcaagaggccgtggaggaggaagacgagcggtggtcgttcttggcgctgctcttcgagctgttgcagaagtcgctgctcgggtgcaggacggtgggcggcgacggtgaaggcgaacacggcggcggcgggatggagatcgggctgcccacggacgtgcaacatgtcgcgcacgtcacgttcgataggttccatggattcctggggctgcccgttgaattcaagcccgaagtgcccctccgtgctcccagcgtgagcaagacaaaggtgataaaacttgatggggaactaattaaaccgtttgaggagaaatatcagaaggatgcttatacataccaagcgagacatgtgtttattccgataaacatccgaggaacgcactgtggtgttgtacgaattttattcttctgcagtaacaggtacagaaccattgttgctttcagatttgtcgagtaccacaagtcatacattggacagtcacagtgtactgagttcaagatagtgtacagagccgttgcgatgcccgtgcctctgcccccgcctcctctaccctcgcgacgcaacatcactgcgaacactctagcagtgctagaagccatggctgcacacaatgtgaggactctcatctactccagcacgtgtgcgacctatggagagcctgacaagatgccctcgctgaaggaactccccagcattatattggtgatatctcagagttggatgcattggaaggctttgctaaagagaaagcagtattctaacatggcatgttcctaccttgttttcttatttgtctgtgttgtctcctgcatgttatacacaaaatctttgtacccacaatctttgtattctaagatcgataagtgcccaaaatctttgtatgcttctaaacagacctttggtattgttgtacacattggattcaataccacttctgttgtctcggtcaattatttccgttgggataagaaggaagaacaatcctctgagttgtacagattctgccgtctcatgaccaaattccgcaacatctattttcctgacctatgaacccagctttcttgtacaaagttggcattataagaaagcattgcttatcaatttgttgcaacgaacaggtcactatcagtcaaaataaaatcattatttgcca

SEQ ID NO: 482 - protein, 411 aa, Zea mays
MTEVALLRGPTNLASTVSRASVSSPSSTLCYLANADSDVLLRSGSPERTAGSARSRRLLEQRGQEAVEEEDERWSFLALLFELLQKSLLGCRTVGGDGEGEHGGGGMEIGLPTDVQHVAHVTFDRFHGFLGLPVEFKPEVPLRAPSVSKTKVIKLDGELIKPFEEKYQKDAYTYQARHVFIPINIRGTHCGVVRILFFCSNRYRTIVAFRFVEYHKSYIGQSQCTEFKIVYRAVAMPVPLPPPPLPSRRNITANTLAVLEAMAAHNVRTLIYSSTCATYGEPDKMPSLKELPSIILVISQSWMHWKALLKRKQYSNMACSYLVFLFVCVVSCMLYTKSLYPQSLYSKIDKCPKSLYASKQTFGIVVHIGFNTTSVVSVNYFRWDKKEEQSSELYRFCRLMTKFRNIYFPDL

SEQ ID NO: 483 - DNA, 2121 bp, Zea mays
atgcttttttataatgccaactttgtacaaaaaagcaggcttaaacaatggcttctaacagcggcggcaactctccaccgcatcttggagctcgagggcggggagtcactcgacgtcgacgcgcacgacgtgtttgaccatgactcagacctctacagcaagatggtccgctacccgcttgaggtgctagccatcttcgacattgtgctcatggacctcgtcgcgcgcatcgagccgctcttcgagaagcacatccagaccagggtctacaacctcaagtcgtccatttgcttgaggaatctcaacccatctgatattgagaagatggtatccatcaagggtatgataattagatgcagctcagtcattccggagctcaaggaggctgttttccgctgcttggtttgtggtttctactcagagcccgtcacggttgatagagggagagtaactgagccacacatctgtcagaaagagcaatgtaaagccacaaattctatgaccctagtgcacaaccgatgcagattttcagacaagcagatcataaagttgcaggaaacaccagatgagatacctgaaggtggcactccacatacagttagtgtcttgatgcatgataagcttgttgatgctggaaagcctggagatagagttgtgataactggtatatacagggctatgagtattagagttggaccaactcaaaggactgtgaagtctatattcaagacatatatcgattgccttcacataaagaagacagacaagtctaggcttcatgtggaggataccaaggatattgataattctaatgctagcaaatgtactgaagaggattttcttagtgataaggttgagaaactaaaagagctttcaaagttgcctgatatctatgacagattgactagatcattagctccaaacatatgggagttggatgatgttaaaagaggcctcctttgccagctttttggcggcaatcccttaaagcttccttctggagctagcttccggggtgacatcaatattttacttgtgggtgatcctggaacgagtaaatcccagcttctccagtacatgcataaactgtctcctcgtggtatctacacaagtggcagaggaagttctgctgttggtcttactgcatatgtcaccaaagatcctgagactggtgaaactgttctagaaagtggagcactagttttgagtgacaaaggtgtttgttgcatagatgagttcgataagatgtctgataatgcacgaagcatgttacacgaggtgatggaacagcagaccgtatccattgcgaaggctggaataattgcatctttaaatgctagaacatctgtcctggcatgtgccaatcctaccgaatcacgttacaacccaaggctttctgtaattgacaacattcacttagccccaactctactttcaagattcgacctaatttatcttatcttggacaaggcggatgagcaaactgataggcgcctggcaaagcatattgtttcgttgcattttgagaatccaaatttagaggagctcgaggtgttggatctgcagacactagtttcctacataagctatgcaaggaagtatattcagccacagttaactgatgaagctgcagaggagttaactcgtggctatgttgagatgaggaaaagagggaatagccctgggagcagaaagaaggtcataactgcaactgctagacaaatagagagtttgattcgtctaggtgaagcattagcccggatgcggttctctgaagtggtcgaggtgcgagatgttgtggaggccttcaggcttcttgaagttgccatgcagcagtctgcaacggatcatgcaactgggacgattgatatggatctaatcatgacggggatatctgcaagtgaaaggcagagacggaacgaccttgttgctgcaacccgtaaccttatcgtggagaaaatgcagctcggagggccttcaatgcatatgattgagttgctggaagaactcaggaagcagagctcaatggaaatccatctgcacgaactccgcggtgctcttggcactctgatgactgaaggtgcggttgttatccatggagaaaacgtgaagagagtttga

SEQ ID NO: 484 - protein, 706 aa, Zea mays
MLFYNANFVQKSRLKQWLLTAAATLHRILELEGGESLDVDAHDVFDHDSDLYSKMVRYPLEVLAIFDIVLMDLVARIEPLFEKHIQTRVYNLKSSICLRNLNPSDIEKMVSIKGMIIRCSSVIPELKEAVFRCLVCGFYSEPVTVDRGRVTEPHICQKEQCKATNSMTLVHNRCRFSDKQIIKLQETPDEIPEGGTPHTVSVLMHDKLVDAGKPGDRVVITGIYRAMSIRVGPTQRTVKSIFKTYIDCLHIKKTDKSRLHVEDTKDIDNSNASKCTEEDFLSDKVEKLKELSKLPDIYDRLTRSLAPNIWELDDVKRGLLCQLFGGNPLKLPSGASFRGDINILLVGDPGTSKSQLLQYMHKLSPRGIYTSGRGSSAVGLTAYVTKDPETGETVLESGALVLSDKGVCCIDEFDKMSDNARSMLHEVMEQQTVSIAKAGIIASLNARTSVLACANPTESRYNPRLSVIDNIHLAPTLLSRFDLIYLILDKADEQTDRRLAKHIVSLHFENPNLEELEVLDLQTLVSYISYARKYIQPQLTDEAAEELTRGYVEMRKRGNSPGSRKKVITATARQIESLIRLGEALARMRFSEVVEVRDVVEAFRLLEVAMQQSATDHATGTIDMDLIMTGISASERQRRNDLVAATRNLIVEKMQLGGPSMHMIELLEELRKQSSMEIHLHELRGALGTLMTEGAVVIHGENVKRV

SEQ ID NO: 485 - DNA, 1139 bp, Zea mays
taagctcgggccccaaataatgattttattttgactgatagtgacctgttcgttgcaacaaattgatgagcaatgcttttttataatgccaactttgtacaaaaaagcaggcttaaacaatggccccatccccatatatacgtgcatgcaagccgagaggttcctcagtcgacgcgacgctcgacggcacggcagcagagaaagccaacagcatggctccaccaccatggccggtcgtagcgctgctgctctgcgccgcgctagcgttcgcggcgcggccgagctcggccgtggacccggtgggcacgtactgcgccaagaacttcacgggcgcgcagacgcaggcgagcatcgcccaggtcctggccgcgctggtcccgcgcgcctccgcggcctactacgccacggcgacggccgccggcggcggcggctcggccaccatctggggcctggcgcagtgccgcggcgacgtcccggcgtccgactgcgcgctctgcgtggcggcggcggcgcggcaggcggcggcgtcgtgccggggccaggcggacgcgcgggtctggtacgactactgcttcctccgctacgacgacgccgacttcctgggcctgccggacaccgggtacgcgctcatcctcatcaacaccatgaacgccaccgacccggccgcgttcgaccgcgccgagcgcaggctcatggcgcgcgtcgctgccgacgccgccagcgccgggctggccagggagacggccaggttcggctccgacgggaccaccatctacggcctcggctggtgcaccagggacatcaccgccgccgactgcggcctctgcgtcgcgcaggccgtcgccgagctccccaactactgccgcttccgaaggggctgccgcgtgctctacagcagctgcatggctcgctacgagacctaccctttcttcttcccggtcaccggcgccggcgccggcgccggcgctgacgcctcctcctcccacgccggcgagtacgagactgtcgtcttgacgaaccacaaatagacccagctttcttgtacaaagttggcattataagaaagcattgcttatcaatttgttgcaacgaacaggtcactatcagtcaaaataaaatcattatttgccatccagctg

SEQ ID NO: 486 - protein, 302 aa, Zea mays
MAPSPYIRACKPRGSSVDATLDGTAAEKANSMAPPPWPVVALLLCAALAFAARPSSAVDPVGTYCAKNFTGAQTQASIAQVLAALVPRASAAYYATATAAGGGGSATIWGLAQCRGDVPASDCALCVAAAARQAAASCRGQADARVWYDYCFLRYDDADFLGLPDTGYALILINTMNATDPAAFDRAERRLMARVAADAASAGLARETARFGSDGTTIYGLGWCTRDITAADCGLCVAQAVAELPNYCRFRRGCRVLYSSCMARYETYPFFFPVTGAGAGAGADASSSHAGEYETVVLTNHK

SEQ ID NO: 487 - DNA, 691 bp, Zea mays
atgagcaatgcttttttataatgccaactttgtacaaaaaagcaggcttaaacaatggggaggccgagcagggggcggcagcgcatcgagatccgtcgcatcgaagaaggcggccggctgcaggtcaccttctcgaagcgcaagtccggcctgcaaaagaaggccgccgagctctccctcctctgcggctcgccggtcgccgtcgtcatcttctcccccggcaggaaggtgttcgcgctgggcaccccctcggtcgaccacgtcctccgccgccacgctcctccggtcctcggcgaaggagaggaggacgggctccttccggcgctccaggacggaaacgtcgtgatgagcagcagcgctatcgccgaccgcgcggaggtggagaacatcgtgcggcgtacggaggagaccaaggcgcgttcggtggcggagaaggcgcggatggacgccgtcgggaaggccgtgaggcaggccgcggcaaaggccggaaggaggttctggtgggaggcggactccggcgagctcggggacgctgagctgccaggattcgccaaggcgctccgtcggctcagggtcaacctgcagcgccatttggactcgctgtcggcgtctgctaataagcaactgcagtagacccagctttcttgtacaaagttggcattataagaaagcattgcttatcaatttgttg

SEQ ID NO: 488 - protein, 192 aa, Zea mays
MGRPSRGRQRIEIRRIEEGGRLQVTFSKRKSGLQKKAAELSLLCGSPVAVVIFSPGRKVFALGTPSVDHVLRRHAPPVLGEGEEDGLLPALQDGNVVMSSSAIADRAEVENIVRRTEETKARSVAEKARMDAVGKAVRQAAAKAGRRFWWEADSGELGDAELPGFAKALRRLRVNLQRHLDSLSASANKQLQ

SEQ ID NO: 489 - DNA, 1671 bp, Zea mays
atggcgcacggcagcgcggaagcggcgacgacgttgcagttgcagaggaggaggagagccgagcggccgagccgaggaggaggattccgatgggcgatggacacgggattgggctggaccgctgtagtaaatagtagttgtagaaatttcagccactggcccagcccatccgtagcaggcgtcagcgcaactcaggcaaacaacggaacggaaaccccggccgtcactgcgccagagctggagacagagatcatggtgcgggcatgggggcggcggacggcgctgcctccgctcctcatccttggcctcctccgcctgcactactcctcgctggtcgtcgcccaagaaggacaagaaaaagaccctgctactttgttcgcacaagcctcagggatgatggacctgaggaagtatgatggggcgcttggcctgctaaatgctgtgttggaaattgacccaaatcattctgaggcttataggcagcgtgcatccgtgcttcggcataaatgcagatacgaggaagctgagagggactataacaaacacctggagctaagtcctgggtctgcttcagtggtgaaggaattatcccagcttctgcaggctcaaaattcattacaatctgcttatggccaattcgattctggagacttctcaaaagtcgtggaatacatcaacaaaattgtgctggttttttctccaggttgcttaaaggcaaagcttctcaaggctaaagcattgctagcactgaaagactactcaagtgttatttcagagaccggattcattctaaaggaagatgaagacaacttggatgcactgctattacgtggtcgtgcctactattaccttgctgatcatgatgtggcctccaggcactaccagaaagggcttcgtcttgatccagagcattccgaattgaagaaagcatatttcgggttaaaaaatcttttgaagaagaccaagagtgcagaagataatgctgccaagggtaagctacgtgtgtctgttgaggactacaaggcagctctagcaatggatccagaccatactgcttataatgtacatctttatcttgggctgtgtaaaactctggttagacttgggagaagtaaggaggcaatcagcacttgtacggaagcactgatcatagacagtgaacttgttgatgcgcttacacagagaggtgaagctaaacttctctcagaagattgggaaggagcagttcaggatttaaaagaggccgcccagaaatctccacaggacatgggtatccgtgaagcacttatgagagctgaaaagcagcttaagttgagcaaaagaaaagactggtataaaatccttggtgtttcaaagacagcatcagctgcggagataaaacgcgcctacaaaaagctggcgttgcagtggcatccagataaaaacgtggataaccgggagaaagcagaaaacatgtttcgagaaattgctgctgcttatgaggtgcttggtgatgaagacaaacgtgtaaggtatgaccgtggagaggatgtggaggagatgaatatgggaggcgggggtggcttcaatccttttgggggaggcggccagcagtacacgtttcaatacgacggtggcttccccggcggcggcttccctggaggtggcggctttcagttcaactttggataa

SEQ ID NO: 490 - protein, 556 aa, Zea mays
MAHGSAEAATTLQLQRRRRAERPSRGGGFRWAMDTGLGWTAVVNSSCRNFSHWPSPSVAGVSATQANNGTETPAVTAPELETEIMVRAWGRRTALPPLLILGLLRLHYSSLVVAQEGQEKDPATLFAQASGMMDLRKYDGALGLLNAVLEIDPNHSEAYRQRASVLRHKCRYEEAERDYNKHLELSPGSASVVKELSQLLQAQNSLQSAYGQFDSGDFSKVVEYINKIVLVFSPGCLKAKLLKAKALLALKDYSSVISETGFILKEDEDNLDALLLRGRAYYYLADHDVASRHYQKGLRLDPEHSELKKAYFGLKNLLKKTKSAEDNAAKGKLRVSVEDYKAALAMDPDHTAYNVHLYLGLCKTLVRLGRSKEAISTCTEALIIDSELVDALTQRGEAKLLSEDWEGAVQDLKEAAQKSPQDMGIREALMRAEKQLKLSKRKDWYKILGVSKTASAAEIKRAYKKLALQWHPDKNVDNREKAENMFREIAAAYEVLGDEDKRVRYDRGEDVEEMNMGGGGGFNPFGGGGQQYTFQYDGGFPGGGFPGGGGFQFNFG

SEQ ID NO: 491 - DNA, 2469 bp, Zea mays
atggtgaagaagaagctgaagaaactgtatggccgggatgctcgggagttctttaaccaggtcatggtggagcaacctttgctgcccttcctgatcccgcttggcctctttgcgtggttcatcgaacggtgggttgtgccattctcgaactgggttcccctcgctgctgccgtttgggcaaccattcagtatgggaggattaagaggaggacaactgtagaagatttgaacaaaagatggaagcatcttatactgaatacaacacccaccacaccaatcgagccttgcgaatggttgaacaaacttttgttagaagtttggcctaattacatggagccaaaactatcgaagaggtttcagtctaccgtcgagagacgtttaaagaatcgaaaaccaaaattaatagataaaatagaattacaggaattctcacttggttcttgtccacctaccttgggagatcagggcatgcgttggattacttctggtgaccagcaagtcatgtgcttgggatttgattggaatagccacgagatgagtgtaatgtttttggcgaaattagcgaagccactgattgggacttgtcgaattgttataaacagcattcacatcaagggagatcttctactatcacccatacttgatggggaagctatactctattcttttgaatcaaccccagaagtcaggattggggtagcatttggaagtggtggaagtcaagcaattcctggtatggagttaccaggtgtctcgacatggctggtgaagcttttgactgaaaccttagggaaaacaatggttgaacctcgccggctatgtttttctttgccatcagtagatctaaggaaacgagcagttggaggtgttctctcagttactgttgtatcagctagtaacctctgtaagagcacagctaatgatatagggaactgccaaagctcaaatggaggggccacgtatggaattgctgataacaaggtatcacagacatttgttgaggtagaagttggcaatttgatgagaaaaacaagtaccagtaagggtctaaatcctacatggaacagtacatttaacatggtacttcatggagagacaggcattgtcaagtttcttctgtatgaattggattctggcggtgtcaaattcaattacttgacaagctgtgagataaaggtaaagtatgttcatgatggttcaacaatattttgggctataggacataactctggtgttgttgcaaagcatactgagcattgtggacaagaagttggaatggttgttccatttgaggatataaatggcgagttaactgtaagccttgtgctaaaagaatggcagttctctgatggatcggttacattgagtaattctctgggcaatggacttcaaagctcatttgatggatcgacaaagcttcagtccacaacaggaaggaaagttagggtcagagttgttgagggcagggcacttacagctaatagtaaatctggaaaatgtgacccttatgtgaaactccagtatggaaaggctctataccgaacaaaaacactgacacatacggtccgaccagtttggaatcacaagtttgagtttgatgagatctctggtggtgaatatctgaagatcaaatgctataatgcagatatgtttggtgatgaaagcattggtagtgcgagagttaatttggagggacttttagagggtgctacccgtgatgtttgggtcccacttgaaaaagtagattcaggagagataaggcttgaaatagaggcaataaagaatgatcacaacaatagcttgcagagctcaagcagtaaagctggatctggttggattgagctagtcataatcgaagccagagatcttgttgctgcggatctgagaggcactagtgatccttatgtcagggtgcactatgggagcaagaagaaacgaaccaaggtcatttacaaaacactgtctccacagtggaaccagacattcgagttcctggaaaccggagaacccctgattttgcatgtgaaggaccacaacgccgtccttccaaccgccagtatcggccattgcaccgtcgagtacagcatgctgtctccaaaccaatccgctgagaaatggataccgctccaaggcgtaaaaagcggagagatccatgtaagggtggcactgaaggtatcagtaccaggttcggagaagaagaacatgctcggggcaggtccgttcggcaaggggcacaagatgtcgacacagatgagagacagcctgaagagattcacgggcttgatcgacgacggcggtgacccggaggcactggcactagccgtggcggagatggaaggcatccagggcgagcaggaagagtacgtcgaaaccctggagcgggagaaggcgatgctgttgcacaagataaatgagcttggttccgaaatcattaggacagcatctggtcctccaaggacgccgtactag

SEQ ID NO: 492 - protein, 822 aa, Zea mays
MVKKKLKKLYGRDAREFFNQVMVEQPLLPFLIPLGLFAWFIERWVVPFSNWVPLAAAVWATIQYGRIKRRTTVEDLNKRWKHLILNTTPTTPIEPCEWLNKLLLEVWPNYMEPKLSKRFQSTVERRLKNRKPKLIDKIELQEFSLGSCPPTLGDQGMRWITSGDQQVMCLGFDWNSHEMSVMFLAKLAKPLIGTCRIVINSIHIKGDLLLSPILDGEAILYSFESTPEVRIGVAFGSGGSQAIPGMELPGVSTWLVKLLTETLGKTMVEPRRLCFSLPSVDLRKRAVGGVLSVTVVSASNLCKSTANDIGNCQSSNGGATYGIADNKVSQTFVEVEVGNLMRKTSTSKGLNPTWNSTFNMVLHGETGIVKFLLYELDSGGVKFNYLTSCEIKVKYVHDGSTIFWAIGHNSGVVAKHTEHCGQEVGMVVPFEDINGELTVSLVLKEWQFSDGSVTLSNSLGNGLQSSFDGSTKLQSTTGRKVRVRVVEGRALTANSKSGKCDPYVKLQYGKALYRTKTLTHTVRPVWNHKFEFDEISGGEYLKIKCYNADMFGDESIGSARVNLEGLLEGATRDVWVPLEKVDSGEIRLEIEAIKNDHNNSLQSSSSKAGSGWIELVIIEARDLVAADLRGTSDPYVRVHYGSKKKRTKVIYKTLSPQWNQTFEFLETGEPLILHVKDHNAVLPTASIGHCTVEYSMLSPNQSAEKWIPLQGVKSGEIHVRVALKVSVPGSEKKNMLGAGPFGKGHKMSTQMRDSLKRFTGLIDDGGDPEALALAVAEMEGIQGEQEEYVETLEREKAMLLHKINELGSEIIRTASGPPRTPY

SEQ ID NO: 493 - DNA, 1075 bp, Zea mays
tgcaacaaattgatgagcaatgcttttttataatgccaactttgtacaaaaaagcaggcttaaacaatgggtctgccgatgaggagggagagggacgcggaggcggagctgaacctgccgccggggttccggttccaccccaccgacgacgagctggtggagcactacctgtgccgcaaggcggcggggcagcgcctccccgtgcccatcatcgccgaggtggacctgtacaggttcgacccctgggacctgccggagcgcgcgctcttcggggcccgcgagtggtacttcttcacgcccagggaccgcaagtaccccaacggctcccgccccaaccgcgccgccggcaacgggtactggaaggccaccggcgccgacaagcccgtcgcgccgcgcggccgcacgctcgggatcaagaaggcgctcgtcttctacgccggcaaggcgccgcgcggggtcaagacggactggatcatgcacgagtacaggctcgccgacgccggccgcgccgccgccgccaggaaggggtcgcttaggttggatgactgggtgctgtgccggctgtacaacaagaagaacgagtgggagaagatgcagctggggaagaccgccgtcgccggcgtcggcgccaccaaggaggaggcgatggacatggccacctcgcacacgcactcccactcccaatcacactcgcactcgtggggcgagacgcgcacgccagagtcggagatcgtggacaacgacccgttcccggagctggactcgttcccggcgttccaggacccggcgatgatgatgacggtgcccaaggaggagcaggtggacggctgcagcgccaagagcggcaacctgttcgtggacctcagctacgacgacatccagggcatgtacagcggcctcgacatgctgccgccgcccggggaggacttctactcctcgctcttcgcgtctcccagggtcaaggggaaccagcccgccggagccgccgggttgggacagttctgaacccagctttcttgtacaaagttggcattataagaaagcattgcttatcaatttgttgcaacgaacaggt

SEQ ID NO: 494 - protein, 312 aa, Zea mays
MGLPMRRERDAEAELNLPPGFRFHPTDDELVEHYLCRKAAGQRLPVPIIAEVDLYRFDPWDLPERALFGAREWYFFTPRDRKYPNGSRPNRAAGNGYWKATGADKPVAPRGRTLGIKKALVFYAGKAPRGVKTDWIMHEYRLADAGRAAAARKGSLRLDDWVLCRLYNKKNEWEKMQLGKTAVAGVGATKEEAMDMATSHTHSHSQSHSHSWGETRTPESEIVDNDPFPELDSFPAFQDPAMMMTVPKEEQVDGCSAKSGNLFVDLSYDDIQGMYSGLDMLPPPGEDFYSSLFASPRVKGNQPAGAAGLGQF

SEQ ID NO: 495 - DNA, 1986 bp, Zea mays
cccaaataatgattttattttgactgatagtgacctgttcgttgcaacaaattgatgagcaatgcttttttataatgccaactttgtacaaaaaagcaggcttaaacaatgggttctttggggcttcctgtttcattcagcacaagtaaagtgaacaagaacacatgcaacaagggaaagaaaaaaggaagacaagcaccgctcaaagcagcaaacactcaaatcaatgatgctgtgaggatatgtatcaatactgaagatagagaaaattctgttgaatcattggatgctatggagcaaacgcactcatgcaatttatttgtgacaccactgggtcaaaatgaaccctcccgtgatgacactgacaagaggcttagggaagacagctcttgtgttgaagaacaagaagagtctggctgtagcaccatctactctgctggcaaagcccctggctgtgatgctaaaaatcatctcactgaacttggggcttttgagctttctgataacttggccaactcagcaaaagaagaatactcaattcaagaaaatcaagcttatgaaagtgtgttgctagattctgaagagatgtcaaggaatgactgtgttgatgatgaatctacacattcctgtgttggcatttatcaggatgaaagagtgtccacaaggggagatcaaacatctgaagaaactctatcagtaccccatgattacaatgatgttggcagagaagctagtctaagtttggcagagccatcatctattgatgagcatgcacaaagctctgccaacaacttttactatgactatggtgaatggagggttatctgggatccattctataatcggtattatttttacaacatccagacacaagagtccacatggtgtcctcctgaaggactggaggattttgcatcatattgtagcccagataccactaaagagctagctgaactgggatctcagtgttcaagcatggcaccacaagagaacaatctggctactcatgtcaatcatttagaagcacaggagcaagatcactgcattcatgatttatctgacattcctgttgaaaagccaatatatcaaagtatgataactacctctgacaaagcacagcacactgaaaataagtacagcgattcaacaactactgtgttagagatgaaccaggaagttgctagcaccaaaacgaaaaagagagtaaggagatctcgatcgtatcattcatgccaagacatggcagggaacgtctctaatgacatcatcaagtactgggctcagcggtattcacttttctcactttttgatagtggtataaagatggatgaagtagggtggttttcagttacgccagagccaattgcaaagcatcatgcatctcgtgtgggtgcgggagtaatgattgattgtttcacaggagttggtggaaatgccatccaatttgccaaaaagtgcaagcatgtaattgcagttgatattgatccacaaaagattgattgcgcgcatcataatgcatccatttatggagtaaatgatcacatagatttcattgtaggtgattttatacatatagctcctcatctgaagggagaaactgctttcatgtcgcctccttggggtggccctgactatgccaaagttgatgtttatgatatgaaaagcatgcttattccttgtgatgggtactctctttttaaactcggaaccatgatagcttcaagagtagtgatgtttcttcctcgcaacattgacctaaaccaattggcggacatgtccttgtctgtggatcccccgtgggcagttgaggtcgagaagaacttcctcaacggaaagctgaaagccataacagcttactttgaagaacaggatcgttgaacccagctttcttgtacaaagttggcattataagaaagcattgcttatcaatttgttgcaacgaacaggtcactatcagtcaaaataaaatcattatttgccatccag

SEQ ID NO: 496 - protein, 589 aa, Zea mays
MGSLGLPVSFSTSKVNKNTCNKGKKKGRQAPLKAANTQINDAVRICINTEDRENSVESLDAMEQTHSCNLFVTPLGQNEPSRDDTDKRLREDSSCVEEQEESGCSTIYSAGKAPGCDAKNHLTELGAFELSDNLANSAKEEYSIQENQAYESVLLDSEEMSRNDCVDDESTHSCVGIYQDERVSTRGDQTSEETLSVPHDYNDVGREASLSLAEPSSIDEHAQSSANNFYYDYGEWRVIWDPFYNRYYFYNIQTQESTWCPPEGLEDFASYCSPDTTKELAELGSQCSSMAPQENNLATHVNHLEAQEQDHCIHDLSDIPVEKPIYQSMITTSDKAQHTENKYSDSTTTVLEMNQEVASTKTKKRVRRSRSYHSCQDMAGNVSNDIIKYWAQRYSLFSLFDSGIKMDEVGWFSVTPEPIAKHHASRVGAGVMIDCFTGVGGNAIQFAKKCKHVIAVDIDPQKIDCAHHNASIYGVNDHIDFIVGDFIHIAPHLKGETAFMSPPWGGPDYAKVDVYDMKSMLIPCDGYSLFKLGTMIASRVVMFLPRNIDLNQLADMSLSVDPPWAVEVEKNFLNGKLKAITAYFEEQDR

SEQ ID NO: 497 - DNA, 795 bp, Zea mays
ggccccaaataatgattttattttgactgatagtgacctgttcgttgcaacaaattgatgagcaatgcttttttataatgccaactttgtacaaaaaagcaggcttaaacaatggcagcgacggtgatggcctccatgagccccctcgcctccgccacccccggcgcgcgtcgcgctttccctgtacggctgctgctccaggcatctgcgctcgcgccgcgccggcgcgccttggccgtgaccgtgagggcccagagcgacgacgccgaggccgagccaaaggaggcggcggcggcggccaccaccccggcgccaaagtccaaggcggcggcggcggcgagccccgggctgtgggacgcgctggcgttcagcggcccggctcccgagcgcatcaacggccggctcgccatggtgggcttcgtgtcggcgctcgccgtcgaggcgtcccgcggcgggggcctcctctcgcaggccggcagcgggtccgggctcgcctggttcgcggccacggctgccgtgctgtccgtggcctcgctggtgccgctgctcaggggcgacagcgccgaggccaggagcggcgccgtcatgagcgccaacgccgagctctggaacggccgcttcgccatgctcggcctcgtcgcgctcgccttcactgagtacctcaccggcgcaccgttcatcaacgcgtagacccagctttcttgtacaaagttggcattataagaaagcattgcttatcaatttgttgcaacgaacaggtcactatcagtcaaaataaaatcattatttgccatc

SEQ ID NO: 498 - protein, 192 aa, Zea mays
MAATVMASMSPLASATPGARRAFPVRLLLQASALAPRRRALAVTVRAQSDDAEAEPKEAAAAATTPAPKSKAAAAASPGLWDALAFSGPAPERINGRLAMVGFVSALAVEASRGGGLLSQAGSGSGLAWFAATAAVLSVASLVPLLRGDSAEARSGAVMSANAELWNGRFAMLGLVALAFTEYLTGAPFINA

SEQ ID NO: 499 - DNA, 986 bp, Zea mays
caaataatgattttattttgactgatagtgacctgttcgttgcaacaaattgatgagcaatgcttttttataatgccaactttgtacaaaaaagcaggcttaaacaatgctcaacatgatgactgatctgagctgcgggccgccgtccaaggtcaaggagcaggcggcggcggcgccgacgggctccggcgacaggcaggggcaggggagaggcaagatcgagatcaagcgcatcgagaacacgacgaaccggcaggtgaccttctgcaagcgccgcaacggcttgctcaagaaggcgtacgagctctcggtgctctgcgacgccgaggtcgcgctcgtcgtcttctccagccgcggccgcctctacgagtacgccaacaacagtgtgaagtccaccattgagaggtacaagaaggccaacagtgactcctccaactctggcacagttgcagaagtcaatgcccagtactaccagcaggagtcctccaagctgcgacagatgatccacagcttgcaaaacgcaaacactaggaacatagtgggagattcaatccacaccatgggcctcagggatcttaagcaaatggagggcaagctggagaaagccataagcaagattagagctagaaagaatgagctgctatatgctgaagttgactatatgcaaaaaagggagatggatctgcagactgataacatgtacctgaggagcaagatcgctgagagtaatgaaacggggcagccggcgatgcacatgatgggagtgccgccgccgacgagcgagtacgaccacatggcccctttcgactcgagaaactttctgcaagtgagcatgcctcagcactactcccatcagctgcaacctacaaccctccagctcggatgaacccagctttcttgtacaaagttggcattataagaaagcattgcttatcaatttgttgcaacgaacaggtcactatcagtcaaaataaaatcattatttg

SEQ ID NO: 500 - protein, 259 aa, Zea mays
MLNMMTDLSCGPPSKVKEQAAAAPTGSGDRQGQGRGKIEIKRIENTTNRQVTFCKRRNGLLKKAYELSVLCDAEVALVVFSSRGRLYEYANNSVKSTIERYKKANSDSSNSGTVAEVNAQYYQQESSKLRQMIHSLQNANTRNIVGDSIHTMGLRDLKQMEGKLEKAISKIRARKNELLYAEVDYMQKREMDLQTDNMYLRSKIAESNETGQPAMHMMGVPPPTSEYDHMAPFDSRNFLQVSMPQHYSHQLQPTTLQLG

SEQ ID NO: 501 - DNA, 807 bp, Zea mays
ggccccaaataatgattttattttgactgatagtgacctgttcgttgcaacaaattgatgagcaatgcttttttataatgccaactttgtacaaaaaagcaggcttaaacaatggcagcaacaagggcttccccagtgcttctcttgctgctcaccgtccagctcagcttgctcttccgcctccccgactccccctccaccctcgccctcgccctcgccgcggaaccagagcaacagaacgccaagcagcatcgccagcccgcgctgctggtgcagtcgacgtgcaactccaccagcttctacgacctctgcatcgccgcgctcgccgccgaccccgccagctccaccgccgacgtcccgggcctcggcgccatcgccgtgtccgccgccgcaaacaacgcctccggcacggccgccttcctcggcaacgccagcgacgccgcggccaccccgcaggcggaccgcgcgctcctcgcgtccctcgccgagcaggcctacgactacgccttcgtgcacgtgagcgccgccggcgagtaccccgcggtgtgccgcacgctgttccggcgccggcagcagcagcagcgtggggcgagtaggtctgcgtacccggcggagctggccaagagggaggaggcgctgcggcgcctgtgcaccatcgccctcgacatcatctccctgctgcaaaaccaggagacctactagacccagctttcttgtacaaagttggcattataagaaagcattgcttatcaatttgttgcaacgaacaggtcactatcagtcaaaataaaatcattatttgccatc

SEQ ID NO: 502 - protein, 196 aa, Zea mays
MAATRASPVLLLLLTVQLSLLFRLPDSPSTLALALAAEPEQQNAKQHRQPALLVQSTCNSTSFYDLCIAALAADPASSTADVPGLGAIAVSAAANNASGTAAFLGNASDAAATPQADRALLASLAEQAYDYAFVHVSAAGEYPAVCRTLFRRRQQQQRGASRSAYPAELAKREEALRRLCTIALDIISLLQNQETY

SEQ ID NO: 503 - DNA, 1297 bp, Zea mays
caaataatgattttattttgactgatagtgacctgttcgttgcaacaaattgatgagcaatgcttttttataatgccaactttgtacaaaaaagcaggcttaaacaatggattcagcttttagaagagctctcaatgagcctatgtgcttggaagaaaccgtcgtccaacaaggaattgaaaggtgcccattcctgaggaacatcaatgagcctacaagtttttccttctcgtccgtcaacttccctattcccgcaagaggagccaagggaccgattttcgaagatgggcctaattttgacatggcatttcgagttttccatggtagagatggggttgttccactttcagaagggtcattggcccagattgagaagccactgccaaagcccaatcctgagttcaacccattggcagccaaagcagcaaccatcagtctatctgcatttggagggtttttcagctttggtgacttctcaaataagcgcaataagaaaaactccaacaagaagaaccccaacaacctcccccagaataaaggccagcctaacaataacaaccatgaagcactgagcaacgagtggctggagatgggccaatgtccacttgcgaaatcttatagggcattaagtggaattgtgccacttgtcgcaaagatgatgacacccccagctggtatgaaacttaagtgcccacctgccgtggttgctgcccgcgcagcactatcccgcacagcctttgctaaggggcttcgccctcagcccctgccaacaaaaatactggtgattgcattgcttggtatggcagcaaatgttcctctgggcatctggagggagcacacacagaagttttcattgcagtggtttgccgcagtacatgctgcagtgccgttcatagggatgctcaggaaatctgtgctgatgcctaagacagccatggcccttactatagccgcctcgatattgggtcagacaatcgggtcaagagctgaacgtatcagactgaagagggccgcggcagcaaaattagcaagagagagccatggtgacgctgctgactacatcaaagcaccaatgagtctgaaaacagggaaccacactgttcagttttgggatccgctttccctcagagctgaaagcacagtggctgcaggtaccacagcagttcttgtccctgccatttctgctttcaactgaacccagctttcttgtacaaagttggcattataagaaagcattgcttatcaatttgttgcaacgaacaggtcactatcagtcaaaataaaatcattatttgcc

SEQ ID NO: 504 - protein, 362 aa, Zea mays
MDSAFRRALNEPMCLEETVVQQGIERCPFLRNINEPTSFSFSSVNFPIPARGAKGPIFEDGPNFDMAFRVFHGRDGVVPLSEGSLAQIEKPLPKPNPEFNPLAAKAATISLSAFGGFFSFGDFSNKRNKKNSNKKNPNNLPQNKGQPNNNNHEALSNEWLEMGQCPLAKSYRALSGIVPLVAKMMTPPAGMKLKCPPAVVAARAALSRTAFAKGLRPQPLPTKILVIALLGMAANVPLGIWREHTQKFSLQWFAAVHAAVPFIGMLRKSVLMPKTAMALTIAASILGQTIGSRAERIRLKRAAAAKLARESHGDAADYIKAPMSLKTGNHTVQFWDPLSLRAESTVAAGTTAVLVPAISAFN

SEQ ID NO: 505 - DNA, 1235 bp, Zea mays
taagctcgggccccaaataatgattttattttgactgatagtgacctgttcgttgcaacaaattgatgagcaatgcttttttataatgccaactttgtacaaaaaagcaggcttaaacaatgccagtggttgagctgtggttgctgctgccttctgctgcacctccggtcgatctggtcgcttccaacgtctgcgcgcccaacgcttctcaccttccgtcgccttccctctcacacgcacccacccgccgccagtcacagctaccacgcagctgcaccgtgcacccacccgtgacctatatatcccgcggcgccggctctcttgacctctcgccgccggcgcgcgcgctgttcctgtcgatggaaaacttgccgctccttggaggcatccggcagcaaccaaacactcagctggctactgctacgtgcctcgctgcgccgcagccggagcaacatgcgtgcagggatgcgacgacgacgacgtctctcgtcgttccggccatgagtttcccgccggctgccgtggactgggcgtcgctgcttctcccgcgcagcacgtcggggggcgcgaacgaactggagagcggcggcggtatcgctgaaacggtggccgggagcagcgctagcgcgacgacggcaggagagggggataacaataagaccggaaaggccgggaggggcggcggcagggggaagaaaaaggcgagccgaccacggttcgcgttccagacgcggagcgaggacgacgtcctcgacgacggttaccggtggcggaagtacgggcagaaggccgtcaagaacagcgcgtttccaaggtggatcgtctctttatcgatgctcatgcatgcatgcatgtctcttgtactatatatgctagcttcaatcgtgtgctgtggaaactggaaacaacgcaatgttggcatgcatgcaatgcaggagctactaccggtgcacgcaccacacgtgcgaggtgaagaagcaggtgcagcggctggccaaggacacgagcatcgtggtgaccacgtacgagggcgtgcacaaccacccgtgcgagaagctcatggaggcgctcagccccatcctcaagcagctccagctcctctcgcagctccagtcctgcactaaacccagctttcttgtacaaagttggcattataagaaagcattgcttatcaatttgttgcaacgaacaggtcactatcagtcaaaataaaatcattatttgccatccagctg

SEQ ID NO: 506 - protein, 334 aa, Zea mays
MPVVELWLLLPSAAPPVDLVASNVCAPNASHLPSPSLSHAPTRRQSQLPRSCTVHPPVTYISRGAGSLDLSPPARALFLSMENLPLLGGIRQQPNTQLATATCLAAPQPEQHACRDATTTTSLVVPAMSFPPAAVDWASLLLPRSTSGGANELESGGGIAETVAGSSASATTAGEGDNNKTGKAGRGGGRGKKKASRPRFAFQTRSEDDVLDDGYRWRKYGQKAVKNSAFPRWIVSLSMLMHACMSLVLYMLASIVCCGNWKQRNVGMHAMQELLPVHAPHVRGEEAGAAAGQGHEHRGDHVRGRAQPPVREAHGGAQPHPQAAPAPLAAPVLH

SEQ ID NO: 507 - DNA, 1056 bp, Zea mays
atgagcaatgcttttttataatgccaactttgtacaaaaaagcaggcttaaacaatggccaagctccaagtcactcctggcgccgcgttcaccgagtgcaatgaactcaacttccagggcctgtacatgtaccacacgcccctgggtcccaaggccaaccaagctgcgatcctagagagcaaggccaagatcggcatcggtgccaccgtggttaacaactgggcagtgtatgacgggccagggccaggcgccaagctcgtcggccgtgcgcagggcttgcacatcctagccggaaactgggtcaactcattcaccctggtgttcgaggatgaaaggttcagtgggtccacgcttgaagtgaggggcataacggttgaaactggcgagtgggctgttgttgggggcaccggccagtttgctatggcgaacggcatcatctccaagaagttacacgagcagagaagcgacgggaacgtcatagagcttagtgtccatgctttctgcccgctgctcaaagggaaaaggggcggtgctgtgacaaaggttgggccatggggcggaagcggagggtctccaatggagctgacagagacggagacgctcatgcgtctggagagcatcaccgtcagcagcggcgtggccgtcaactccatctcattctcctacgtcgactctgccggccacaagcgctctgctggtccctggggtggttccggtggacagcctgatcaggtccagctcgccgagtctgaggtggtcacacaagtgtccggaacatacggcaccatcgacgacgacgaccgcaccgtgataacctccattaagttcgtcacgaaccttgacaagacctacgggcctttcggagcgtacggggacggcgacgacacctccttcaccgtccccgtgcagccggggagtggcgccatcgtgggcttcttcgcccgcgttggcggggccggggactacctggacgccattggcgtctacgtgcgccccctctaaacccagctttcttgtacaaagttggcattataagaaagcattgcttatcaattt

SEQ ID NO: 508 - protein, 315 aa, Zea mays
MAKLQVTPGAAFTECNELNFQGLYMYHTPLGPKANQAAILESKAKIGIGATVVNNWAVYDGPGPGAKLVGRAQGLHILAGNWVNSFTLVFEDERFSGSTLEVRGITVETGEWAVVGGTGQFAMANGIISKKLHEQRSDGNVIELSVHAFCPLLKGKRGGAVTKVGPWGGSGGSPMELTETETLMRLESITVSSGVAVNSISFSYVDSAGHKRSAGPWGGSGGQPDQVQLAESEVVTQVSGTYGTIDDDDRTVITSIKFVTNLDKTYGPFGAYGDGDDTSFTVPVQPGSGAIVGFFARVGGAGDYLDAIGVYVRPL

SEQ ID NO: 509 - DNA, 401 bp, Zea mays
gtgacctgttcgttgcaacaaattgatgagcaatgcttttttataatgccaactttgtacaaaaaagcaggcttaaacaatgtcgaccaccacccccaccaacgccgcctcccagcagggcgacgacgctgcggctggccgcgcggacaagaagccggcgcaagagacggtgacgaagacggtgcagacggtggaggtgcggtcctcggcagggcagcccgacgaggagggcgtgctcaagcccgtgaaggtggtgcacgagatccccgccaaggacagctccggcgtcaagcaggactagacccagctttcttgtacaaagttggcattataagaaagcattgcttatcaatttgttgcaacgaacaggtcactatcagtcaaaataaaatcattatttg

SEQ ID NO: 510 - protein, 73 aa, Zea mays
MSTTTPTNAASQQGDDAAAGRADKKPAQETVTKTVQTVEVRSSAGQPDEEGVLKPVKVVHEIPAKDSSGVKQD

SEQ ID NO: 511 - DNA, 2679 bp, Zea mays
atgggccgcccaaagggcggcgccgcgtcctcctcgaagaagccgaaggcgaagcagaaacagcgaggcggcgtcgacttcaagaagtacaagcacaaggtcgggcgcaagcttccgccgccgaagaatgccaccaacacggaaatcaagtccaaagcgatcgtgctgccggagcagagcatggcgtcggagaggacgggcatggcagtgaacaagcgcgggctcacgctacgggagctcctgcagcagacgggacactacaatgccaatgtgcggcgggctgcactgaatggaataaaggacattgttgtcaagcacccaacagagcttaaactgcacaaggttgctataattgagaagctgcaggagagaatatgtgatactgacaaggtggtccgtgaatcgttatacaatatactgcagtctctgatcttcccatctttgaaagaggataacactatatctgtgcggagtacactgtttttgctgatggctaatattctgaatggaacgacccatctatctgtggagatccagttaatggcttttaggtttttggagcttgtggttcttaatttcccgtcatccttttctagttatgctgaacagaccttcaacaactttgttgcggtactgagcaacgacagaatcaacctacatgataggaataaacttaacagtgttcttagtgggcttggccactgcctttccttggttgctaaaacgatagaaaatgatgatacatcaaatcgacaggctcataacctctctgcaagggaaaattggaaatttaccactgatgaagatagcacaggaggggcattttcaatgtccaatttattaacgaagcttcagaaccttgtccaaatcctcactaattctgtagaggtttcagcttcagagctctgtgcaaagtcagctcttgatgttcagtcaagtgaagcattgctatcagcccttcagtgtctggatctaatctgtaggatatttgttcatgaggtgaagaaacctcagttgaaattctccataccaaaaaatcagcatggaccagactggttgagaagttctttactggtacatctaaataatttatggggagtgaagcgcttgtttcatggaaagggagacgacaaatttttcattttcaatttaaggattgctgaaatctttctgcgcttgaatgtatggatagataacactgtgttttcagctgaagaattttgcctttttgtgtcttctctgttcgcaaaggcaaaaacacttcgcaataaggacctcatcgaaatatatttgagcccacttataacctgcattccaggtcttatatccaatgctccagatgactcaaaaggctatttgttggaggtatttacggactcatttaaagattgcaaggtggattgcaagctaatgttgccatatttggatgcagttggaggaatgctttttcctgagaaaacaagcatatggcttgctgaaaatgattcaggtgtgttgggctatcatgacatatggatacatgagctacctggaattttgctacaatcaattgataaagcccccttagttacaaaggttgctttggagcttcttctaagaattgggcaatacttccctgcagtggactgtggaaggctgcgccccttcatgaagttatttggtgttgagtcattaccaggagctgtggatcttggtccttttgttaaacttcctcgtgattgccaagaacttgccatttcatgcctttattattttcccagtctgctccctgacgtcattgagccattggcctcatgttgcttaagtgatgcgctggaacccctcatactgttcagggccattgaagtcctacagtcaacatacaaggctggtagtttacatataacagagcaactcagtttcttgttgctgctaatggcaagattcagagttcatcctggggacatagttactctggaggattctagcaagctttcaaattgggatactttcaagtcattgaatcgcctaattttgacttccctatctgaaatgggcgatggctcgctggtccttgaattgatttggaataatttatttaatgcaattgctcaaaaaccatcgttgcataacatgaatggcttgcttagaattattgttacacttgatgccggaactagtaagctcatgaatggaaatgttgtaaagcttatagctggttacttggttgatgcatctttggatctgtctaaatccaccgaatttggttttcaacccgataagacgagactatttcagtactttctcaagccatgcaccatcatgtttgacaagaatgacaaggttctttgcagcacattggagtccctcaaatcttttgtaacaggaggcgatcatctgctttcatctgtctccaacttaaactacccaggagagctgtcgtgtcgagtttgtgctgtcacaaccatactcattttcttatgcaatgaccggaaactccataggaatctttctcttggcaaattggttattaaaggcatcctggaatatataaggcatcagctggattctagtgtgcctgatgtaacacatgtaggaaaacaaaagttaaaatctgcttttgagcaactcaagaccaaagcattgcagttgaattgctgggatagaagtgagctggagggtttttcgagtgctacatga

SEQ ID NO: 512 - protein, 892 aa, Zea mays
MGRPKGGAASSSKKPKAKQKQRGGVDFKKYKHKVGRKLPPPKNATNTEIKSKAIVLPEQSMASERTGMAVNKRGLTLRELLQQTGHYNANVRRAALNGIKDIVVKHPTELKLHKVAIIEKLQERICDTDKVVRESLYNILQSLIFPSLKEDNTISVRSTLFLLMANILNGTTHLSVEIQLMAFRFLELVVLNFPSSFSSYAEQTFNNFVAVLSNDRINLHDRNKLNSVLSGLGHCLSLVAKTIENDDTSNRQAHNLSARENWKFTTDEDSTGGAFSMSNLLTKLQNLVQILTNSVEVSASELCAKSALDVQSSEALLSALQCLDLICRIFVHEVKKPQLKFSIPKNQHGPDWLRSSLLVHLNNLWGVKRLFHGKGDDKFFIFNLRIAEIFLRLNVWIDNTVFSAEEFCLFVSSLFAKAKTLRNKDLIEIYLSPLITCIPGLISNAPDDSKGYLLEVFTDSFKDCKVDCKLMLPYLDAVGGMLFPEKTSIWLAENDSGVLGYHDIWIHELPGILLQSIDKAPLVTKVALELLLRIGQYFPAVDCGRLRPFMKLFGVESLPGAVDLGPFVKLPRDCQELAISCLYYFPSLLPDVIEPLASCCLSDALEPLILFRAIEVLQSTYKAGSLHITEQLSFLLLLMARFRVHPGDIVTLEDSSKLSNWDTFKSLNRLILTSLSEMGDGSLVLELIWNNLFNAIAQKPSLHNMNGLLRIIVTLDAGTSKLMNGNVVKLIAGYLVDASLDLSKSTEFGFQPDKTRLFQYFLKPCTIMFDKNDKVLCSTLESLKSFVTGGDHLLSSVSNLNYPGELSCRVCAVTTILIFLCNDRKLHRNLSLGKLVIKGILEYIRHQLDSSVPDVTHVGKQKLKSAFEQLKTKALQLNCWDRSELEGFSSAT

SEQ ID NO: 513 - DNA, 2421 bp, Zea mays
atgggggacgccgccaccgccgcagcggcggcggcagcgtcgcccgcttgcgccgcgcggaagcggcggcgcggcgacgacagcgcggggctgaggcgggtggcggagatcgtgatggtcctggccgcggccggggaggtacgcggcgggaggcagcccacggccgcggagcgcgcgctggcggccgaggcgcgggagactctggccaccgccgtcgccgagagggccgtgcggcccaaggatctgttcccgggggaagcggtgcgcgcggtcgtcgaggatctcgggctcaaccgctccaaggacccagctgccatggggtttcgcccgcccaaggcctccatcgccgataggctcatgcttactaagcgcaaggttttgccaactctctcgtttgcacccattcccgcacagtttactagccattgtggtggctttgaaattcttaactggggtgataaatgtgatatggaagaagtcaaggaagctccagtggttagcgcacctcaaacagtcgtctcaagtggaacgtctgagttccatggtttgaatggggctaccaagtttggtgttggagttcctaggaacccaccagttccatctttagctgctactggcccattaacctctacatccccagttaccttgaagccaccaggatcatctcctgtaaaaccagttgccaactcatcagttgttcctctagtcaatactggtccatcaaaccttaaattggacaaaaatgttagtggtcctctgaatttagcattcagtggagcaacggtcgtccactcaaacaagtcaactttagacacatctgctaggcccgatgtaaatgctgtacagagttccaatcagacggtgaaaaaccatgacacaaaaccagtggcagttcaagccgcgacaggtaaccctgttatgggtcatcgtgctacaccaggcgtggcatttgctccaccaaaacctactttcatcaatcacaatgagatagcaaagaatgttctacaatttcttcaccaacctgcaaaccatcctagctggactccaccatcaactgagtacatgcattctcgtttgtgctgtcaaatatgcaaagttgatatcattggtacagacaatttacttgtttgtgatgcttgcgagaggggagtacacttgaaatgccttcatcagtatggcaataagggcgtccccaaagctgagtggcattgttctgcatgcctgactcagagtaagggaaaacccttgccaccaaaatatggcaaggttacaaggactgtagttgcatcaaagactgctccacctggtggtggagcacagctttctttgcaggaatcagcagaaaacatggctgcaaaggaaaatcaccaaaagttggctgcaaatggaaatcttatgaagccattctccattcatggtggcagcacagtacccgacagtaatgtattggcactgagtgctgtcatggctggttcacaatcacaattagtttctaccttgagaccatcaatagtcgttaaagctgaaacaccctctaatggaaaggaaggaactgggcaaccatgcaatactgcaatacaacctaatgtgcgatcatcttctcttaacaacagattgagaagtgattcctgtttgaaccctgctgattcagcaaatgaaatcatgcatggtaagcatgctgcagaaatttctggtgttgaagcaaaggtcaagtctgaagcaaactctgaggttgttgtgagtacagatgaggaattggttcatagcagtggaacatcaatcgaaactgaacgagccaaggttgtcgctattgaagaaaacagggcacaatcaacctttgagacagataaaatgaaagttggggaaacaactatcaacacaggaacaacagatcaatgcatcaatactgaagaaaagctccccagtttagcaacttctgaggcacacacaatcactgacgtgaagatgactagcaatacaggaataccagtacagcaacacaacattgctactattgaagagaagacccagattgatgcagtgtctgatccacatccacatgcaatccaagatattcaagatatggaaatgggcaccaacaatggaccacccatagatcaaacaagcagtcttgttgaagaaaacccccctggacaatcctcttcaattgctgatgcgtgtgtcactgctaatactggaataccaacagatcaaacacagcatccaaatgagtcaactgaaaatgcagtaaagaaatctcccaacagagaactatataaagaaaaaccgggctgcaacataacctcagatattacccaaaaagtaacttcaaatggcatcatgtgccctgaggacaaaactttatgtgttcatgaagataaagcagtgggttgtgacacagaagcaaaagaagaaaactaa

SEQ ID NO: 514 - protein, 806 aa, Zea mays
MGDAATAAAAAAASPACAARKRRRGDDSAGLRRVAEIVMVLAAAGEVRGGRQPTAAERALAAEARETLATAVAERAVRPKDLFPGEAVRAVVEDLGLNRSKDPAAMGFRPPKASIADRLMLTKRKVLPTLSFAPIPAQFTSHCGGFEILNWGDKCDMEEVKEAPVVSAPQTVVSSGTSEFHGLNGATKFGVGVPRNPPVPSLAATGPLTSTSPVTLKPPGSSPVKPVANSSVVPLVNTGPSNLKLDKNVSGPLNLAFSGATVVHSNKSTLDTSARPDVNAVQSSNQTVKNHDTKPVAVQAATGNPVMGHRATPGVAFAPPKPTFINHNEIAKNVLQFLHQPANHPSWTPPSTEYMHSRLCCQICKVDIIGTDNLLVCDACERGVHLKCLHQYGNKGVPKAEWHCSACLTQSKGKPLPPKYGKVTRTVVASKTAPPGGGAQLSLQESAENMAAKENHQKLAANGNLMKPFSIHGGSTVPDSNVLALSAVMAGSQSQLVSTLRPSIVVKAETPSNGKEGTGQPCNTAIQPNVRSSSLNNRLRSDSCLNPADSANEIMHGKHAAEISGVEAKVKSEANSEVVVSTDEELVHSSGTSIETERAKVVAIEENRAQSTFETDKMKVGETTINTGTTDQCINTEEKLPSLATSEAHTITDVKMTSNTGIPVQQHNIATIEEKTQIDAVSDPHPHAIQDIQDMEMGTNNGPPIDQTSSLVEENPPGQSSSIADACVTANTGIPTDQTQHPNESTENAVKKSPNRELYKEKPGCNITSDITQKVTSNGIMCPEDKTLCVHEDKAVGCDTEAKEEN

SEQ ID NO: 515 - DNA, 1332 bp, Zea mays
atggaggatgcgatggcggcggacgggaagagcgtgctgcaggggcggtacgagctggggcgggtgctggggcacggcaacttcgggcgggtgcacgcggcgcgggacctgcgcacgggccgcagcgtcgcggtcaaggtggtggccaaggacaagctggagcgcgcgggcatggcggagcagatcaagcgggagatcgccgtcatgaagatggtgtcccaccccaacatcgtggagctgcacgaggtgatggccacccgctccaagatctacctcgcgctcgagctcgtccgcggcggggagctcttctcccgcatcgcgcgcgcggggcgggtccgggaggacgtggcgcgctgttacttccggcagctcgtcgccgcggtcgacttctgccacggccgcggggtgttccaccgagacctgaagctcgagaacctgctcctcgacgaggtaggcaacctcaaagtggcggactttgggctcagcgcgctcgccgggcacgcgcgctccgacgggctgctccataccgcctgtggcacgccgtcatacgtcgcccccgaggtgctcggcgggaagggctacgacggcgccaaggcggacctctggtcctgtggcgtcatcctctacgtgctcctcgttggcagcttgccattccacgaggacaacctcatggtcatgtaccggaagatgcagcgcggcgagttcctctgcccgccgtgggtctcagcggacgcccggaagctcatcggcgagctgctcgaccccgacccgagcacgcgcatcaccgtcgctcgcctcgtcgagacgccgtggtaccggaagccgttgcccgtcctgccgccgctcaacctcaaggagccaaccccggacgcgcgccgcgccacctctgacaaggaagagcccgaggtgctgaacgcgttccacctcatctctttctcggagggcttcgacctgtccccgctcttcgaccagggccgtggcggcggcgtagggaggtctagcgcgggcggcatccgtttcgtgacgcgcgaggccgccagcagcgtggtctcccgtctggagtcgctggtcaccggccgcggagccaacatgcgcgtgacaaagagcggctcgcggggcgttcgtttggaggccgtgtcgcgcgggcgctcgggggcgcggctggcagtggccgcggagatcttcagcgtggcgccgtcggtgctcctggtggacgtgaagaaggacggcggcgacacgatggagtaccggtcgttctgtagcgaggagctccggccggcgctcaaggacatcgtctgggcctccagccaggacacaccgggcgccgcttga

SEQ ID NO: 516 - protein, 443 aa, Zea mays
MEDAMAADGKSVLQGRYELGRVLGHGNFGRVHAARDLRTGRSVAVKVVAKDKLERAGMAEQIKREIAVMKMVSHPNIVELHEVMATRSKIYLALELVRGGELFSRIARAGRVREDVARCYFRQLVAAVDFCHGRGVFHRDLKLENLLLDEVGNLKVADFGLSALAGHARSDGLLHTACGTPSYVAPEVLGGKGYDGAKADLWSCGVILYVLLVGSLPFHEDNLMVMYRKMQRGEFLCPPWVSADARKLIGELLDPDPSTRITVARLVETPWYRKPLPVLPPLNLKEPTPDARRATSDKEEPEVLNAFHLISFSEGFDLSPLFDQGRGGGVGRSSAGGIRFVTREAASSVVSRLESLVTGRGANMRVTKSGSRGVRLEAVSRGRSGARLAVAAEIFSVAPSVLLVDVKKDGGDTMEYRSFCSEELRPALKDIVWASSQDTPGAA

SEQ ID NO: 517 - DNA, 531 bp, Zea mays
acaaattgatgagcaatgcttttttataatgccaactttgtacaaaaaagcaggcttaaacaatgtcggcgtccccggagttgtacaggcccgcggaagcgccggccttctcgccgtcctgcgccacgcagccgctcgtgttcgccggcgacgactactgctgcaggacgccgacgggcagcgggatctgctacctgagggagcccaccacgtgcccgcccgcgccccggaagccgccgccgccgccgcccatgtgcaggaagcgcctcttccaagcggcggatcagcaggttgctgaggcggggcccgtccctgttatcagcatccgcctcgacgagctggagcgcctcttccgcccctgtccgccgccgaccaccaccaccaccgacaagcgacgccgctccggctccggccccagccccagatccgccacgaaacatggtgctcagctgcagctgcgcagcatgaattgaacccagctttcttgtacaaagttggcattataagaaagcattgcttatcaatttgttg

SEQ ID NO: 518 - protein, 136 aa, Zea mays
MSASPELYRPAEAPAFSPSCATQPLVFAGDDYCCRTPTGSGICYLREPTTCPPAPRKPPPPPPMCRKRLFQAADQQVAEAGPVPVISIRLDELERLFRPCPPPTTTTTDKRRRSGSGPSPRSATKHGAQLQLRSMN

SEQ ID NO: 519 - DNA, 745 bp, Zea mays
gcaatgcttttttataatgccaactttgtacaaaaaagcaggcttaaacaatgcaacgggcagtgcaggccgtcaggtcacacggcaatgttcttaaatatgctgttctacaacacatcagcgctcccaagccagcaatgcttcctgctgccttttctcgtttcatgtcagtttcatctgctcgcctagaggatcgtggatttgaaactgccactgtagcagatgtcttgaagtctaaagggaagagtgctgatggatcttggctctggtgcaccacagaggatagcgtctatgacgctgtcaaatctatgactcagcacaacgtgggagctttggtggttgtcaaacctggacagaataaatcaatcgctggcattgtcactgagagagattatctccggaaaatcatagtgcagggaaggtcttccaagtcaactaaggttggcgacatcatgactgaagagaacaaactgatcacagtgaatcccgacaccaaggtcctgcaggcaatgcagctcatgacagaaaaccgcgtcagacacatcccggtgatcgacggcacggggatgctggggatggtctccatcggtgacgtcgtgcgcgcggtggtggccgagcacagggaggagctgaaccggctcaatgactacatccagggaggctactagacccagctttcttgtacaaagttggcattataagaaagcattgcttatcaatttgttgcaacgaacaggtcactatc

SEQ ID NO: 520 - protein, 205 aa, Zea mays
MQRAVQAVRSHGNVLKYAVLQHISAPKPAMLPAAFSRFMSVSSARLEDRGFETATVADVLKSKGKSADGSWLWCTTEDSVYDAVKSMTQHNVGALVVVKPGQNKSIAGIVTERDYLRKIIVQGRSSKSTKVGDIMTEENKLITVNPDTKVLQAMQLMTENRVRHIPVIDGTGMLGMVSIGDVVRAVVAEHREELNRLNDYIQGGY

SEQ ID NO: 521 - DNA, 1632 bp, Zea mays
atgggaaagcaaggaccctgccgtcattgcggagtcacaagtactccgctgtggcggaatgggccaccagataagccggtgctctgcaatgcgtgtggctcgaggtggagaacgaagggttcattggcaaactacactccaatgcatcgcaatgacaatattgatgatgatgaacccagagttagcaagctgaagccaccgacgtcaaagttgaagtcacagaagaaaaaaacaaatcacattataatggagaatggaccattctctggtcagaatttccgaaagatgggggatgttgacccaagctatcggtctagttcaggatctgcagtatcatactctgagagttgtgccccatatggtgctgctgatgcaagtgaaatgactggttcagcacagtcacatgcttgggagtccctagtgccatcaagaaagaggagctgtgtcacccgtccgaagccttcacctgttgaaaagcttgcaaaagagctgaactatatcatgcatgaagagaagttatattacctttcagaatcatcagaggaagacctactataccatagtgaaactcctatcggttcctttgaaataggctctggaagtgtgcttctaagacatccaaactcgaaatcactggaggaagaatcaaaaacaagctcaattcctgcagataataaatcatatattacaagtgaatcctattcagactctgcctcatttgtcgttcacagtggaaacaaggcagcaattaacttaaatcttccaactgcaaggccgaagaagtcgccgctgcatatggaagacaatgctagaagggataaacttcattatgagaatcagcatgtcctggagagtgttgattcgcctttagtttcagtagatttagaggatgttataaactatactaacttcatgaaatatctaactaaagaggatcgacgtcagttgctcaaatttcttcctcctgtggactccttaacacctcctgaaagccttagaagcatgttcagttgtatccaattctctgatgctattgacagctaccagatgctgcttcgagagggaattctcgacccatccttatgtggtgatgaggaatggaagaaagtgaagacgcttgccttaactaatttaacaaaatgcagttggctggagtgctataaacagaaaaagggagctaaagaaaccgggggagtggggggcatcagtggaccggaaggctttaccaagtctactatgaaaccactcaaaagaccccgtgacacccactttcagagtgacgcagaactagatggtaccatgaggagtcctctaagagttctaaaatccggggctttggctcttcagtttgaaagttcatctttgccaaaatctggctatgccaccgaagattcaacctgcactggaggagcacctaatctattcatgttacccctagaaaagctaccattactggtcccttctcagtatgccgtctctgatcaagacttgctgctggaaatacctctcaacgcacgacacccagaggcagaacttctctgtcaaccatctcagctgatgagctctataaccagcagctccacctctatgggtggggttgctgaaggagaagggtacctgaagcaaccatag

SEQ ID NO: 522 - protein, 543 aa, Zea mays
MGKQGPCRHCGVTSTPLWRNGPPDKPVLCNACGSRWRTKGSLANYTPMHRNDNIDDDEPRVSKLKPPTSKLKSQKKKTNHIIMENGPFSGQNFRKMGDVDPSYRSSSGSAVSYSESCAPYGAADASEMTGSAQSHAWESLVPSRKRSCVTRPKPSPVEKLAKELNYIMHEEKLYYLSESSEEDLLYHSETPIGSFEIGSGSVLLRHPNSKSLEEESKTSSIPADNKSYITSESYSDSASFVVHSGNKAAINLNLPTARPKKSPLHMEDNARRDKLHYENQHVLESVDSPLVSVDLEDVINYTNFMKYLTKEDRRQLLKFLPPVDSLTPPESLRSMFSCIQFSDAIDSYQMLLREGILDPSLCGDEEWKKVKTLALTNLTKCSWLECYKQKKGAKETGGVGGISGPEGFTKSTMKPLKRPRDTHFQSDAELDGTMRSPLRVLKSGALALQFESSSLPKSGYATEDSTCTGGAPNLFMLPLEKLPLLVPSQYAVSDQDLLLEIPLNARHPEAELLCQPSQLMSSITSSSTSMGGVAEGEGYLKQP

SEQ ID NO: 523 - DNA, 366 bp, Zea mays
atgtcgctcgtgaggcgcagcaacgtgttcgaccccttctcgatggacctctgggaccccttcgacaccatgttccgctccatcgtcccgtcggcgacctccaccaactccgagactgccgccttcgccagcgcccgcatcgactggaaggagacgcccggggcgcacgtgttcaaggccgaccccccggcgtcaagaaggaggaggtcaaggtcgaggtcgaagacggcaacgtgctggtcatcagcggccagcgcagcagggagaaggaggacaaggacgacaagtggcaccgcgtcgagcgcagcagtggccagttcgtcaggcgcttccgcctgccggagaacgccaaggtggatcaggtga

SEQ ID NO: 524 - protein, 121 aa, Zea mays
MSLVRRSNVFDPFSMDLWDPFDTMFRSIVPSATSTNSETAAFASARIDWKETPGAHVFKADPPASRRRRSRSRSKTATCWSSAASAAGRRRTRTTSGTASSAAVASSSGASACRRTPRWIR

SEQ ID NO: 525 - DNA, 479 bp, Zea mays
taagctcgggccccaaataatgattttattttgactgatagtgacctgttcgttgcaacaaattgatgagcaatgcttttttataatgccaactttgtacaaaaaagcaggcttaaacaatggccggtgtgccgcctaggctgaggtcgagcgacggggcctgctgggacggagacgcgggcctgggcggcgtggcgggcgagtcccgggaggaggaggaggaggactccacggtgctgctgctgctggggctcacggtcacggcggccggcttcttgggcggcggcggcggcggaagcgcggcgaacgcgacggggaagttggtcttggccttgggcccgcggaagtggagcgcggcggcgtcgtagacccagctttcttgtacaaagttggcattataagaaagcattgcttatcaatttgttgcaacgaacaggtcactatcagtcaaaataaaatcattatttgccatccagctg

SEQ ID NO: 526 - protein, 82 aa, Zea mays
MAGVPPRLRSSDGACWDGDAGLGGVAGESREEEEEDSTVLLLLGLTVTAAGFLGGGGGGSAANATGKLVLALGPRKWSAAAS

SEQ ID NO: 527 - DNA, 546 bp, Zea mays
atggccatggcggcggcagcggagggcaagagccggaggttcgcgctggcctgcggggtgctgagccagtacgtgaaggccgagcagcagatggcggccgccggggcccctgccccgcgcgccccggccacgacgctgagcctcatgcccggcgcggacgtcggcgccgagcaggagcaggccgccgcgagggggcaggagacggccgggtccgcctccacggcggcgccgctcaccatcttctacggcggcagggtggtcgtgttcgacgacttcccggcggagaaggcggccgaggtcatgcgcctcgcagctggcgccgagcgcccggcggccccggccccggcgccggcgccgcgcgacgacctgcccatcgcccggaaggcgtcgctgcagcggttcctggccaagcgcaaggaccgcctcgtggagcgcgccccctacgcccgcccgtccccatccgaggaggcggagaaggcgaagccggcctcctcgtggctcgggctcggcggcacggacgccgagcgcctcaacatcgcgctgtga

SEQ ID NO: 528 - protein, 181 aa, Zea mays
MAMAAAAEGKSRRFALACGVLSQYVKAEQQMAAAGAPAPRAPATTLSLMPGADVGAEQEQAAARGQETAGSASTAAPLTIFYGGRVVVFDDFPAEKAAEVMRLAAGAERPAAPAPAPAPRDDLPIARKASLQRFLAKRKDRLVERAPYARPSPSEEAEKAKPASSWLGLGGTDAERLNIAL

SEQ ID NO: 529 - DNA, 655 bp, Zea mays
ctgttcgttgcaacaaattgatgagcaatgcttttttataatgccaactttgtacaaaaaagcaggcttaaacaatgcccgatccagacacgcgaatcctccaatctgcccttgccgccgccgccgacggatccaggtctgtagactgctcactcctctacgctccgctccgaatggcccgcacgaagcagacggcgcgcaggtcgaccggcggcaaggcgccgcggaagcagctggccaccaaggcggcgcgcaagtcggccccggccacgggcggcgtgaagaagccgcaccgcttccgccccggcaccgtcgcgctccgcgagatccgcaagtaccagaagagcactgagctgctcatccgcaagctccccttccagcgcctggtccgcgagatcgcgcaggacttcaagacggacctgcggttccagtcgtcggcggtggcggcgctgcaggaggccgcggaggcgtacctggtggggctcttcgaggacaccaacctctgcgccatccacgccaagagggtcaccatcatgcccaaggacatccagctcgcccgccgcatcaggggcgagagggcttgaacccagctttcttgtacaaagttggcattataagaaagcattgcttatcaatttgttgcaacgaacaggtc

SEQ ID NO: 530 - protein, 169 aa, Zea mays
MPDPDTRILQSALAAAADGSRSVDCSLLYAPLRMARTKQTARRSTGGKAPRKQLATKAARKSAPATGGVKKPHRFRPGTVALREIRKYQKSTELLIRKLPFQRLVREIAQDFKTDLRFQSSAVAALQEAAEAYLVGLFEDTNLCAIHAKRVTIMPKDIQLARRIRGERA

SEQ ID NO: 531 - DNA, 1174 bp, Zea mays
ggccccaaataatgattttattttgactgatagtgacctgttcgttgcaacaaattgatgagcaatgcttttttataatgccaactttgtacaaaaaagcaggcttaaacaatggaaggtgtgacctctgcacccaactctccagggaaggcgcggtctactctccatggcctcccgcaatcagcggtctcttgccccaccgcgacgaccttgccctggctccccatggaaggtcgtggaaggtacgccctccgcgccgcccgcctgtacccgacctccccgcgcgccccagtggtggccaccgccgccaacgtgctcctcgccgacgcctcctcccaccacgccgcgctgctgctgcccgagcctgacgaccccgacgcctcgccgctctccgtctccgagctctgccgccacttcaagtcgctcatcaagtccctccgcgtcggcctcgacgccaccaccgcagccgcctacccctccgttgctgccgccgccgaggaggcactcggccgcgccaccaaggcctacgaggcgctcaccgctcctgcccctgggaccttctggaccgcctgtgccgggtgccgccgcctccacgagttcgagcgcaagtggatgcagcgaccttccttcacggacgacctcctcatcgccttcttccagagcaagatggtgcacgcgagttccactccatccacctattccttccttcctccggtttctcaacaagaagccattagagtgaaggaaaagctcaagaaagaaatggagtgccttgaagttgtgttcaagcaagaaacgtgcagtacgcagcaagaacaaattcaaacatttcagaagcagcttgcagttgcgactgagaagttgaaggtactacacaaggtgtcttacttagctgcagatcagttctttcctgaatggaatgtttggactcagtttctagaggaatctacaataggtttcaagttggatgctcttgcaggttcacatccaattgaggcagcaaatattatcactttgtatgatgtttccaatatctggcgcattcctttgttgctacatgtatggtgaacccagctttcttgtacaaagttggcattataagaaagcattgcttatcaatttgttgcaacgaacaggtcactatcagtcaaaataaaatcattatttgccatcc

SEQ ID NO: 532 - protein, 318 aa, Zea mays
MEGVTSAPNSPGKARSTLHGLPQSAVSCPTATTLPWLPMEGRGRYALRAARLYPTSPRAPVVATAANVLLADASSHHAALLLPEPDDPDASPLSVSELCRHFKSLIKSLRVGLDATTAAAYPSVAAAAEEALGRATKAYEALTAPAPGTFWTACAGCRRLHEFERKWMQRPSFTDDLLIAFFQSKMVHASSTPSTYSFLPPVSQQEAIRVKEKLKKEMECLEVVFKQETCSTQQEQIQTFQKQLAVATEKLKVLHKVSYLAADQFFPEWNVWTQFLEESTIGFKLDALAGSHPIEAANIITLYDVSNIWRIPLLLHVW

SEQ ID NO: 533 - DNA, 411 bp, Zea mays
atggcccgcacgaagcagacggcgcgcaagtcaacgggcggcaaggcgccccgcaagcagctggcgaccaaggcggcgcgcaagtctgcgccggccaccggcggcgtgaagaagccccaccgcttccgccccggcaccgtcgcgctccgggagattcgtaagtaccagaagagcacggagctgctcatccgcaagttgcccttccagcgcctcgtccgtgagatcgcgcaggacttcaagaccgatctccgcttccagtcctccgccgtctctgcgctgcaggaggccgccgaggcctacctcgtggggctctttgaggacactaacctgtgcgccatccacgccaagcgcgtcaccatcatgcccaaggacatccagctcgcgcgccgcatcaggggagagagggcctga

SEQ ID NO: 534 - protein, 136 aa, Zea mays
MARTKQTARKSTGGKAPRKQLATKAARKSAPATGGVKKPHRFRPGTVALREIRKYQKSTELLIRKLPFQRLVREIAQDFKTDLRFQSSAVSALQEAAEAYLVGLFEDTNLCAIHAKRVTIMPKDIQLARRIRGERA

SEQ ID NO: 535 - DNA, 1623 bp, Zea mays
tattttgactgatagtgacctgttcgttgcaacaaattgatgagcaatgcttttttataatgccaactttgtacaaaaaagcaggcttaaacaatggccggtccgccgctcttgagcttccccttcttcttccttctctgcgtcgccgtcgcctggagcgaggcgtatggggcaagcggtggctacgggctcggcgtcaactacggccgggtggcggacgacatcccttcgccgtggcgctccgtggagctgctccgcgcggcgggggccgggtcggtcaagatctacgacgccaacccgggcgtgctccgcgcgctggctgggacgcgctggcccgtctccatcatggtgccaaaccagatcataccggacctcgccgcctctgcggccgcggcggaccggtgggtcgccgagaacctggtcccctactacccggcgacacgggtcaagttccttctcgtggggaacgagatcctctccgacttgtccatcgcgaactccacctggccacaccttgtcccggcgatggagaacatccaccggagcctccgaaagaggagcatcagcagcgtcaagatcggcaccacgctcgccatggacgcgctcgccgacggcgccttcccgcgcccaccgtcggccgccgcgttccgcgccgacatcgccgaggcagtcgtgcgcccgctgctgcacttcttgaacgggaccaactcgtactacttcgtcgacgcgtacccctacttcgtctgggccgacaacaacctcaccgtctcgctcgactacgcgctcttccagggcggacgcacacgctacgtcgacccgggcaccgggctcacgtacaccaacctgctcgacgaaatgctcgacgcggtggtcatcgcgatggcgaagcttgggtacgggcacgtgaagctggccatcgcggagaccgggtggcccaacggctgcgactacaaccagattggcggcaacgtccacaacgccgccgtctacaacaggaacctcgcggcgcggatggctaagaacccgggcacgccggtgaggccgggcgcgaagatgccggtgttcgtgttctcgctctacaacgaggacctcaagccagggccgggcaccgagcgacactggggactgtactacgccaacggcacggcagtctacgagatcgacctcaccggacggcggccactggggtcgtacccgcccctgccggcgccggagaacaacacaccgtacaaaggaccgatatggtgcgtgctctcggccgccgccagcaacaagctgaacgagacggcggtggggaacgcgctgtcgtacgcgtgcgggcagggaaacgggacctgcgacgccattcagcccgggaaaacgtgctacacgcccaacacaacggcggcgcacgccagctatgctttcaattcgtactggcagcagttcgagaagactggagcgacgtgctacttcaacaacctcgcagagcagactatcaaagacccaagtcatggatcctgcaggttccctagctcgtcggggtcgccttgaacccagctttcttgtacaaagttggcattataagaaagcattgcttatcaatttgttgcaacgaacaggtcactatcagtcaaaataaaa

SEQ ID NO: 536 - protein, 479 aa, Zea mays
MAGPPLLSFPFFFLLCVAVAWSEAYGASGGYGLGVNYGRVADDIPSPWRSVELLRAAGAGSVKIYDANPGVLRALAGTRWPVSIMVPNQIIPDLAASAAAADRWVAENLVPYYPATRVKFLLVGNEILSDLSIANSTWPHLVPAMENIHRSLRKRSISSVKIGTTLAMDALADGAFPRPPSAAAFRADIAEAVVRPLLHFLNGTNSYYFVDAYPYFVWADNNLTVSLDYALFQGGRTRYVDPGTGLTYTNLLDEMLDAVVIAMAKLGYGHVKLAIAETGWPNGCDYNQIGGNVHNAAVYNRNLAARMAKNPGTPVRPGAKMPVFVFSLYNEDLKPGPGTERHWGLYYANGTAVYEIDLTGRRPLGSYPPLPAPENNTPYKGPIWCVLSAAASNKLNETAVGNALSYACGQGNGTCDAIQPGKTCYTPNTTAAHASYAFNSYWQQFEKTGATCYFNNLAEQTIKDPSHGSCRFPSSSGSP

SEQ ID NO: 537 - DNA, 2227 bp, Zea mays
ggccccaaataatgattttattttgactgatagtgacctgttcgttgcaacaaattgatgagcaatgcttttttataatgccaactttgtacaaaaaagcaggcttaaacaatgccgcacctcgtcctgcttctcttcctcggcctcggcgggctcctgcccgcggcgtcggccgccgacgagcagttcgtgttcgacggcttcaagggcgcgaacctcagcctcgacgggatggccacggtcacgccggacgggctgctcatgctcaccaacggcaccagccagctcaagggccacgccttctacccggcgccgctgcggttccacggggcgcccgacggcacggcggcagcgatggagtccttctccacggccttcgtcatcggcatcatcggcgcgttcgaggacctcagcagccacggcatggcgttcgtggtcgccaagagcaccaacttcacctccgcgcttccgggccagttcatgggcctcgtcagctccgccaccaacggcaacgccaccaaccacctgttcgccgtcgagttcgacaccatcctcaactccgagttcgacgacatgagcggcaaccacgtcgggatcgacgtcgacggcctcaactccctcgacgccgacaacgccggctactacgacgacgccacgttcaggaacatgagcctggtgagccgcaagccgatgcaggtgtgggtggacttcgacggccggaccatgcaggtcaacgtcaccatggcgcccctggaggctgcccgccgccggcccaggaggcccctgctctccaccaccgtcaacctctcctccgtcatcgacgacggcaccgcctacgtcggcttctcgtcggccaccggcatcctcttctgccgccactacgtgctgggctggagcttcaggatgaacggcgccgccccgccgctcaacgtctcctccctgcccaccctgccagtcacggcacccaggccgaggtccagggcgctggagatcgtgctgccgatagcgtccgcggcgctcgtcttcgcggcggccgccgccgtcttcgcgttcctgcgcaggcggcgcatgtacgcggaggtcagggaggattgggaggcctcgttcgggccgcacaggttctcgtacaaggacctgctccacgccaccgacgggttcagcgacaagcggctgctgggcatcggcggcttcggcagggtgtaccggggcgtgctggcgtccaagacggaggtcgcggtgaagaaggtggcgcacgggtccaggcaggggatgagggagttcgtggccgaggtcgtcagcatcggccgcctccggcaccgcaacctcgtgcagctgctcggctactgccggcgcaagggcgagctgctgctggtctacgactacatgcccaacggcagcctcgacaggtacctctacgaccggagcaggaccgcgctgagctgggggcagaggttccgcatcatcaagggcgtcgcgtccggcctgctgtacctccacgaggactgggagaaggtggtggtgcaccgggacatcaaggccagcaacgtgctgctcgacaaggagatgaacgcgcggctgggtgacttcgggctggcgcggctgtacgaccacggcaccgacccgcacaccacgcatgtggtgggcaccatggggtacatggcgccggagctgggccacacgggcaaggcgtccaaggcgtccgacgtcttctccttcggcgccttcatgctggaggtggcctgcgggaggaagcccgtggtgcaggacgagcgcgacaaccgcctggtgctggtggactgggtgctggaccgctggcgcgctggctgcgtcacggacaccgtggacccgcgcctgcagggcgacttcctcgagcgcgaggccagcctcgtgctgaggctcggcttgctgtgctcacacccgctgcccggcgcgcgcccggccatgcgccagatcgtccagtacctcgacggcgatgcgccgctgccggagctgtcgccgacgtaccagggcttcaacatgctgtcgctcatgcaggaccagggtttcgacccctacatcatgtcgttcccgatgtcgtcgacggggatcagcaccatatctgatctgtccggaggaagatgaacccagctttcttgtacaaagttggcattataagaaagcattgcttatcaatttgttgcaacgaacaggtcactatcagtcaaaataaaatcattatttgccatcc

SEQ ID NO: 538 - protein, 669 aa, Zea mays
MPHLVLLLFLGLGGLLPAASAADEQFVFDGFKGANLSLDGMATVTPDGLLMLTNGTSQLKGHAFYPAPLRFHGAPDGTAAAMESFSTAFVIGIIGAFEDLSSHGMAFVVAKSTNFTSALPGQFMGLVSSATNGNATNHLFAVEFDTILNSEFDDMSGNHVGIDVDGLNSLDADNAGYYDDATFRNMSLVSRKPMQVWVDFDGRTMQVNVTMAPLEAARRRPRRPLLSTTVNLSSVIDDGTAYVGFSSATGILFCRHYVLGWSFRMNGAAPPLNVSSLPTLPVTAPRPRSRALEIVLPIASAALVFAAAAAVFAFLRRRRMYAEVREDWEASFGPHRFSYKDLLHATDGFSDKRLLGIGGFGRVYRGVLASKTEVAVKKVAHGSRQGMREFVAEVVSIGRLRHRNLVQLLGYCRRKGELLLVYDYMPNGSLDRYLYDRSRTALSWGQRFRIIKGVASGLLYLHEDWEKVVVHRDIKASNVLLDKEMNARLGDFGLARLYDHGTDPHTTHVVGTMGYMAPELGHTGKASKASDVFSFGAFMLEVACGRKPVVQDERDNRLVLVDWVLDRWRAGCVTDTVDPRLQGDFLEREASLVLRLGLLCSHPLPGARPAMRQIVQYLDGDAPLPELSPTYQGFNMLSLMQDQGFDPYIMSFPMSSTGISTISDLSGGR

SEQ ID NO: 539 - DNA, 1776 bp, Zea mays
atggacggcaagaaggtgcaggagagggcagcatggtgcgttagcgacggtggcggcaacctagtgcaggatgccgtcgactacaggggctgcagggcggacaagtccagcacgggcggctgggcgtcggcggcgctcgccgttgggatcgagctgtgcgagcgcctctccaccatgggcatcgccgtcaacctggtcacgtacctcactgccaccatgcacctgcctagcgccgcagctgccaacgtggtcaccgacttcatgggcacctctttcctcctctgcctacttggtggattccttgccgactccttcctcggacgatacctcaccatcgccatcttcgccgtcgtccaagccatcggcacggggctcctcgcagtgtctacagaggtgaggcagctgaggccgccgccgtgcggtcccggcgcggctgggccgtgcgagcaggccacggggctccagatgggcgtgctgtacgtgtgcctctacctcatcgcgctcggcactggcgggctcaagtccagcgtctcgggcttcggcaccgaccagttcgacgagcgcgacgcacgcgagcgcgccgccatgggccttttcttcgaccgcttcttcttcttcgtcaccttcggcacgctcctcgccgtcaccgtcctcgtctacgtccaggaccacgtcggccggagctgtgcctatggcatctgcgccggcgccatgctcgtcgcggtcgccgtcttcctatcaggcaccaggcggtaccgctacaagcgcagctccgggagccccatcgtgcacatcctccaggtcctagttgctgccacccgaaaacggaacatcgtcatgcagccactcaccgccgccgcgctctacgaggaccaccctgagcacgcgcgtatcccccacaccgcccagttcccgtgcctggacagggcggcggtgatggctggcgacgacgacaacgaggtgggccacgacgggcggccgacgatgaacccgtggaagctgcgctccgtgtcccgcgtggaggaggtcaagatggtggcccggctgatgccggtgtgggctacgaccatcctgttctggaccatgtacgcgcagatgatcaccttctccgtggagcaggcgacgaccatggaccggcgcatgggcgggttcgagatcccagccgcctcgctcaccgtcttcttcgttggcgctatcatgctcactctcgccttctacgaccgcgtctttgtcccgctctgccggagcctcatgaccggccggcagggatttactaacctggagaagatcggaatcggcctggtcctctccacattcggcatggctgctgcggccatctgcgagaaaaagcgcctcgccgtcgctgccacgagtgtcgccgtagggcatgggtcgctgcccatcagcgtgttcatgctgacgccgcagttcctgctggtgggctccggcgaggctttcatctacacggggcagctggacttcttcatcatgcggtcgcccaagagcatgaagaccatgagcacgggcctcttcctcaccacgctctcgctcggcttcttcctcagcagtgcgctcgtctcgctcgtcaagagctgcacgcggtggctcggcgacaccatcaaccacagccgcctcgactacttctactggctgctggccgtgctcggcgttgtcaatctcgtcgcctacatcgtctatgccatgtgggccgcagcaccggccagcagtcaggcggagcagccgcagcacgcgatggccgcggacgagaaatgctag

SEQ ID NO: 540 - protein, 591 aa, Zea mays
MDGKKVQERAAWCVSDGGGNLVQDAVDYRGCRADKSSTGGWASAALAVGIELCERLSTMGIAVNLVTYLTATMHLPSAAAANVVTDFMGTSFLLCLLGGFLADSFLGRYLTIAIFAVVQAIGTGLLAVSTEVRQLRPPPCGPGAAGPCEQATGLQMGVLYVCLYLIALGTGGLKSSVSGFGTDQFDERDARERAAMGLFFDRFFFFVTFGTLLAVTVLVYVQDHVGRSCAYGICAGAMLVAVAVFLSGTRRYRYKRSSGSPIVHILQVLVAATRKRNIVMQPLTAAALYEDHPEHARIPHTAQFPCLDRAAVMAGDDDNEVGHDGRPTMNPWKLRSVSRVEEVKMVARLMPVWATTILFWTMYAQMITFSVEQATTMDRRMGGFEIPAASLTVFFVGAIMLTLAFYDRVFVPLCRSLMTGRQGFTNLEKIGIGLVLSTFGMAAAAICEKKRLAVAATSVAVGHGSLPISVFMLTPQFLLVGSGEAFIYTGQLDFFIMRSPKSMKTMSTGLFLTTLSLGFFLSSALVSLVKSCTRWLGDTINHSRLDYFYWLLAVLGVVNLVAYIVYAMWAAAPASSQAEQPQHAMAADEKC

SEQ ID NO: 541 - DNA, 894 bp, Zea mays
atgtcctatcacacccatgttccagtatacatacctagatatacatttagctggcttgtggagccaatgtggcaagtcataagattccttcatagagctgctgatttaactttagtaccatctgctgctatcagcaaagattttgaaactgcccaggtcatatcagctaatagaatacgcctttggaacaaaggtgttgattctgcaagcttccatcctagattccgcagtcatgagatgcgagtcaggctaagtgacggtgagcctgaaaaaccactggtaattcatgtcggacgttttgggcgtgagaaaagtttggattttttgaagatggtaatggaaaggttgcctggagtaagaattgcatttattggagatggaccatataggggtgaactagagaagatgtttgaaggaatgccagcagtgttcacaggaatgatgcagggtgaagagctctcgcaggcgtacgccagcggcgatgttttcatcatgccatcggagtcagaaacgctcggccaagtggtcctagagtccatgtcgtcgggggtgcccgtcgtcgcggcccgtgcaggcgggatccccgacataatcccggaggaccaggagggcaggacgagcttcctgttcacccctggtgacctggacgactgcctcggcaaggtccagcagctgctgacgaacagggagtttagagaaaacatggggcggacggccagatccgagatggagaagtgcgactggcgggcagcgtccaagacgatccgcaacgagttctacaatgctgctatctggtactggcgaaagaagcatgcggagctggtgaagccgctgcagtggctggcacagatgttcctgccggcgcctgaggtccgcagcatcatgcaatgctga

SEQ ID NO: 542 - protein, 297 aa, Zea mays
MSYHTHVPVYIPRYTFSWLVEPMWQVIRFLHRAADLTLVPSAAISKDFETAQVISANRIRLWNKGVDSASFHPRFRSHEMRVRLSDGEPEKPLVIHVGRFGREKSLDFLKMVMERLPGVRIAFIGDGPYRGELEKMFEGMPAVFTGMMQGEELSQAYASGDVFIMPSESETLGQVVLESMSSGVPVVAARAGGIPDIIPEDQEGRTSFLFTPGDLDDCLGKVQQLLTNREFRENMGRTARSEMEKCDWRAASKTIRNEFYNAAIWYWRKKHAELVKPLQWLAQMFLPAPEVRSIMQC

SEQ ID NO: 543 - DNA, 666 bp, Zea mays
gtgacctgttcgttgcaacaaattgatgagcaatgcttttttataatgccaactttgtacaaaaaagcaggcttaaacaatgtcgctgattcgccgcagcaacgtgttcgatcccttctccctcgacctctgggacccctttgagggcttccccttcggctccggcaacagcagcagtctcttcccctcgttcccgcggaccagctcggagaccgcggccttcgctggcgcgcggatcgactggaaggagactccagaggcgcacgtgttcaaggccgacgtaccggggctgaagaaggaggaggtcaaggtggaggtcgaggacggcaacgtccttcagatcagcggcgagcgcaacaaggagcaggaggagaagacggacacctggcaccgcgtgaagcggagcagcgggaggttcctgcgcaggttccgactgcccgagaacgccaagacggagcagatcacggccgccatggagaacggcgtgcttacagtcactgtgccgaaggaggacgccaagaagcctgaagtgaagtccatccagatctccggctagacccagctttcttgtacaaagttggcattataagaaagcattgcttatcaatttgttgcaacgaacaggtcactatcagtcaaaataaaatcattatttgccatccagct

SEQ ID NO: 544 - protein, 158 aa, Zea mays
MSLIRRSNVFDPFSLDLWDPFEGFPFGSGNSSSLFPSFPRTSSETAAFAGARIDWKETPEAHVFKADVPGLKKEEVKVEVEDGNVLQISGERNKEQEEKTDTWHRVKRSSGRFLRRFRLPENAKTEQITAAMENGVLTVTVPKEDAKKPEVKSIQISG

SEQ ID NO: 545 - DNA, 1320 bp, Zea mays
acctgttcgttgcaacaaattgatgagcaatgcttttttataatgccaactttgtacaaaaaagcaggcttaaacaatggggaacagtagtagcagcagcgggagcagcagtaagcgtccggggccgtcggagccggcgctgccgccagcgccggcggaagagctgagcgcatacgaggcagcgtgccggtcggatccggagctgcgcacgttcgacacgacgctgcagcggcgcaccaggcgcgccatctcgacgctggcagtgggcgttgaggtgcggtcgatgtcgctggactcgcttcgcgaggtcaccggctgcctcctcgacatgaaccaggaggtggtgcgcaccatcctcgactgcaaagaggacatctggaagagccccgagctgttcgacctcgtcaaggactacttggagagcagcctacagaccctcgatttctgtaccgcactcgaaaagtgcctcaagcgtgcccgcgactcccagctgcccctccgcatcgcgctccagcgcttcgacgacgagaaagacagcgacgccgccgccgctccctccgcccggtacgtgcgcacgctacacgagctgcgccagttcaagacggccgggaaccccttcacggacgagttcttcgataccttcgacgccgtttaccagcagcagcgggacatgctgaagaagctgcagcagcgccagcaccggctcgacaagaaggtcaagaccatccaggcgtggcgccgggtgtcaagcatcatcttcgcgaccacgttcgcggccgtgctcatctgctcgattgttgccgcggtcatcgctgccccgcctgtcgctgcggcattggccgcggctgctgcagtcccgctgggatccatggggaagtggtttgattcgttgctgaaagggtgtcaggacgcggtcaaaggacaggagggggtggtgagcgtaatgcaggttggcacattcattgccatcaaggatttggagagtatcaaagtcctcatcaaacgggtggaggaggagatcagctcaatgatagactgcgtagagtttgcagagcgggatgaggaggcggtgaaatttggggtggaggagatcaagaagaagctggaaagcttcacgaagagtgtcgaggatctaggagatcaagcagaccgatgtacccggcatatccatagggcaaggacccttgttctgggaaggatcatccgacatccaaactgaacccagctttcttgtacaaagttggcattataagaaagcattgcttatcaatttggtggaacgaacaggtcactatcagtcaaaataaaatcattatttgc

SEQ ID NO: 546 - protein, 380 aa, Zea mays
MGNSSSSSGSSSKRPGPSEPALPPAPAEELSAYEAACRSDPELRTFDTTLQRRTRRAISTLAVGVEVRSMSLDSLREVTGCLLDMNQEVVRTILDCKEDIWKSPELFDLVKDYLESSLQTLDFCTALEKCLKRARDSQLPLRIALQRFDDEKDSDAAAAPSARYVRTLHELRQFKTAGNPFTDEFFDTFDAVYQQQRDMLKKLQQRQHRLDKKVKTIQAWRRVSSIIFATTFAAVLICSIVAAVIAAPPVAAALAAAAAVPLGSMGKWFDSLLKGCQDAVKGQEGVVSVMQVGTFIAIKDLESIKVLIKRVEEEISSMIDCVEFAERDEEAVKFGVEEIKKKLESFTKSVEDLGDQADRCTRHIHRARTLVLGRIIRHPN

SEQ ID NO: 547 - DNA, 681 bp, Zea mays
atggagatggtggatgacgacggtggtcctgttcgtggagccggcgcaacagtccagcccgaggggcgcgtccgcggcgtcgctgctggccgagccgtcgtacgacggctcgccgctccgccgccaggcgttccagagctacctcaccaagagcggcgtcatgtcgtcgtccccgaccagcacgctggtctcgcccccgaggtcgccgccgtcggagtccccgccaatgtcgccggacgccgccgccgcggcgcgtggccgggtgtcggcggctcgcccgtcaacgaggtcctcgcctcgctgcgccagctccgcctcggcggcggctcgccgaggtcggcgccttccggcgggtcgttcttggcaggcggctacccgttcgggtccctgaagtcgccggccggtctgtacagtctcccgtccacaccaccaacccggtcgtgcccagtgatggtgaccaccgcctccggcgccaccatcatgaccgtggaacgcctcaacctcgggctcctcgtggacgaggagccggtcatggagcgggtcgagtccgggagagccctccgcgagaaggtgttcgaacggctcagcaaagaaagcgccgtgcccaacgacaccgtcgcctccgccaacgtagaggtagcggctctgaacgtcagttgggtctccgacctcatcaactga

SEQ ID NO: 548 - protein, 226 aa, Zea mays
MEMVDDDGGPVRGAGATVQPEGRVRGVAAGRAVVRRLAAPPPGVPELPHQERRHVVVPDQHAGLAPEVAAVGVPANVAGRRRRGAWPGVGGSPVNEVLASLRQLRLGGGSPRSAPSGGSFLAGGYPFGSLKSPAGLYSLPSTPPTRSCPVMVTTASGATIMTVERLNLGLLVDEEPVMERVESGRALREKVFERLSKESAVPNDTVASANVEVAALNVSWVSDLIN

SEQ ID NO: 549 - DNA, 2725 bp, Zea mays
tcaggagagcgttcaccgacaaacaacagataaaacgaaaggcccagtcttccgactgagcctttcgttttatttgatgcctggcagttccctactctcgcgttaacgctagcatggatgttttcccagtcacgacgttgtaaaacgacggccagtcttaagctcgggccccaaataatgattttattttgactgatagtgacctgttcgttgcaacaaattgatgagcaatgcttttttataatgccaactttgtacaaaaaagcaggcttaaacaatggccttcggagctctcgtcacgtcgaggctggtcaggtccggccacacccttgcatctgccgttgcccagggtcccgttgcccagcggatagcacctcctctgctctccaggcttggagcagtagctcgtcttctcagcacaaagccagccgcaacagatgtcatcggtatcgatctaggcacaacgaattcctgcgtctccgtcatggaaggaaagacaccacgggtgattgaaaatgcagaaggcgcgaggacgacaccctccattgttgccaagaatcagaatggtgacctgttgattggtatcacagcgagccggcaggcagtaaccaatgcccagaacacaatccgtgggtcaaagcgtctgatcggtaggacttttgatgacccacagacccagaaggagatgaagatggtgccttacaagattgtcaaggcgccgaatggtgatgcctgggtcgagatgggtggccagcagtactcccctagtcagattggtgcatttgttctcactaagatgaaggaaactgcagaggcttaccttggcaagacagtctctaaggctgttattactgtcccagcttattttaatgatgctcaacgccaggctaccaaggatgctggtaggattgctggactggaagttatgaggattatcaatgagcccactgctgcagctttgtcttatggaatgaacaacaaggagggccttattgcagtgtttgacctgggtggtggcacatttgatgtgtcaatccttgagatatcaaatggggttttcgaggtcaaggcaaccaatggtgatactttccttggtggtgaggattttgatggtgcactgcttgagtatctggttagtgagttcaagaagtcagacaacattgatctgagcaaggacaagttagcactgcaaaggctcagggaagctgctgagaaggccaaggttgagctttcgtccactatgcagactgaaatcaacctcccatttatcactgctgatgcatctggtgcaaagcacttcaacattaccttgaccagatctaagtttgagtctcttgtgagcaatctcattgagaggactcgcatcccttgtgtgaactgcctcaaggatgctggcatctctgctaaggagattgatgaggtcctactggttggtggtatgactagagtaccaaaggtccaggaggttgtttctcagatattcaataagccaccaagcaagggtgtcaatcctgatgaggctgttgccatgggagctgcaatccagggtggcattttgaggggtgatgtgaaggagctccttttgctggatgtcacacctctctcccgtggtattgagacccttggtggcatcttcacaaggctaattaacaggaacaccacaattccaaccaagaagagccaggtcttctctaccgctgcagataaccagacacaggttggagttaaggtgcttcagggtgagagggagatggctacagataataagctccttggtgagttccagcttgaaggcattccaccagccccaagaggcatgccccagatcgaggttacctttgacattgatgccaatggcattgtaaaggtgtcagctagggacaaagccacaggcaaagaacaagaaatcaccatcaagtcttctggtggtttgtcagaggtcgaaattgagaagatggtgaaggaggccgagctacattctcagaaggaccaggaaaggaagtctcttattgatctcaagaactctgcagataccacgatctacagcattgagaagagtgtcagcgagtacaaggacaaggtccctgctgaagtcaccaaggagatcgagtctgctgtctctgatctgagggcagctatggctgaggacgatctggacaagatcaagcagaagctggaagcagcaaacaaggctgtttcaaagattggagagcacatgcaacaaggtggcggcagcggcagcgctggcggcagcggcagcagcagtggaggagaccagactccagaagctgagtaccaggacgcaaaggaagccaagatgtagacccagctttcttgtacaaagttggcattataagaaagcattgcttatcaatttgttgcaacgaacaggtcactatcagtcaaaataaaatcattatttgccatccagctgatatcccctatagtgagtcgtattacatggtcatagctgtttcctggcagctctggcccgtgtctcaaaatctctgatgttacattgcacaagataaaaatatatcatcatgatcagtcctgctcctcggccacgaagtgcacgcagttgccggccgggtcgcgcagggcgaactcccgcccccacggctgctcgccgatctcggtcatggccggcccggaggcgtcccggaagttcgtggacacgacctccgaccactcggcgtacagctcgtccaggccgcgcacccac

SEQ ID NO: 550 - protein, 681 aa, Zea mays
MAFGALVTSRLVRSGHTLASAVAQGPVAQRIAPPLLSRLGAVARLLSTKPAATDVIGIDLGTTNSCVSVMEGKTPRVIENAEGARTTPSIVAKNQNGDLLIGITASRQAVTNAQNTIRGSKRLIGRTFDDPQTQKEMKMVPYKIVKAPNGDAWVEMGGQQYSPSQIGAFVLTKMKETAEAYLGKTVSKAVITVPAYFNDAQRQATKDAGRIAGLEVMRIINEPTAAALSYGMNNKEGLIAVFDLGGGTFDVSILEISNGVFEVKATNGDTFLGGEDFDGALLEYLVSEFKKSDNIDLSKDKLALQRLREAAEKAKVELSSTMQTEINLPFITADASGAKHFNITLTRSKFESLVSNLIERTRIPCVNCLKDAGISAKEIDEVLLVGGMTRVPKVQEVVSQIFNKPPSKGVNPDEAVAMGAAIQGGILRGDVKELLLLDVTPLSRGIETLGGIFTRLINRNTTIPTKKSQVFSTAADNQTQVGVKVLQGEREMATDNKLLGEFQLEGIPPAPRGMPQIEVTFDIDANGIVKVSARDKATGKEQEITIKSSGGLSEVEIEKMVKEAELHSQKDQERKSLIDLKNSADTTIYSIEKSVSEYKDKVPAEVTKEIESAVSDLRAAMAEDDLDKIKQKLEAANKAVSKIGEHMQQGGGSGSAGGSGSSSGGDQTPEAEYQDAKEAKM

SEQ ID NO: 551 - DNA, 2665 bp, Zea mays
ttcgttgcacaaattgatgagcaatgcttttttataatgccaactttgtacaaaaaagcaggcttaaacaatgggcaaggcgaaggggaagcagcgtcaggacaagttctaccacctcgccaaggagcaagggtaccggagtcgcgcggcgttcaagctgctccagctcgacgcgcggttccacttcctcccgacggcgcgctcggtgcttgacctctgcgccgcgccgggagggtgggtccaggtggccgtcaaccatgctcccgtgggtgccttcgttgtcggcgtcgacctcgttcctatacgccccatccgcggggcccactcgctcaccgaggacatcaccgccaccaagtgccgcgccgcggtgcggaggctcatggactccaacggcgtctccgcttttgacgtcgtgctccacgacgggtcgcccaacgtcggtggtgcctgggcgcaggaggctacgtcgcaatcggcgctcgtcatagacgcactgcgcctcgctaccatgttcctcgctcccaagggcgccttcatcacgaaggtttttaggtctcaagattacaacgctattatgtactgtcttaaacagttgtttgagaaggtcgaggcgactaaacctacggcaagtcggtctacatctgctgaaatttatatcatttgcctgaaatacaaggctcctgcaaagattcaaccagaacttctcgatataaagcacttattcagtgtggttccagaacagaccaaatctagggatgttttggatggtaggaaaaaaagacaccgtgatgggtatgaagaagggaatacaacattacggaaagttggtttggcatcagactttatatggtctgacacccaggcgccactagagtttttgggctcttacaatgcaatttcattcgataatccagaatccctgcccataaagaatcatgagcttacaacagatgatataaaaaatttctgtgaggacttgcttctgttggataaacatagtttcaagcatattttaaaatggcgaattcgtttacgaaaatcactgtcagcatcatcacaagtcaccccaaaggtcaatgatgctgtggagagcacaaaggtcatggatgatgatgtacttctacaggaaatggaagaattgactagtgtcattgatagaaagaaaaaaagagaaaaaaagcgactatcaaagcgtcgagcaaaggataaagcacgcaaagccacaggaatgcaggttgatgctacaggagatgattatggcgatcctgacctgttttctattagtgttattaagggtggaaaagaacttgaagctgttgaatcagcagagattgatgtggaagatgaaattggagacggtgataatgaggatactcaagctcttgaagactctgatgaggaaatggattctgatgacgaacagcagaggtatgatgcccagcttgaagagatgcttgatgaagcttatgagcgctttgtaactaaaaagggtggtgaaataaagcaagaacgcaagcgtgcaaaacgaataaatcctgatgctgatgcagaactgttagagggaggtgaagatgatggtgatgttgaaatggatcaagattttgatgaagatcaagatcaagaggccaacccccttctgtttgctctagatgagcagaagccaactaaagagcagattgtaaagcaatggtatagtcaggatgtgttcacggaagcagcgaccggtgttactgagcggagcgacactgaagatgaaagggagattttgcagaggaataagaagatggatactggcaaaagggaaaaggtggctaaagcacaggatttgcaacatgatggttttgagattgtaccagcagaacctgtccaaaacgaagaggattcatcttcatcttctgatgaatcagaggatgatatcgatgattacagaaaggctgaagtactagcctatgctaagaagatgctgaggaagaaacagagagagcagatacttgatgatgcttacaacaagcatatgtttgatgacgaagggttacccaactggtttgttgaggatgaaaagaggcataggcagcccatgaagcctgtttcacgtgaggaagtagctgcaatgagggctcagtttaaggagattgatgcccgcccatccaagaaggtcgcagaggccaaggctcggaagaagcgtgtcgccatgaagaaacttgacaaggcacgccaaaaggcagatgctatagcggaccagaatgacataaacgagctatcaaagaggaagatgattgaccggatttacaggaaggcgatgccgaagaagcctcagaaggagtatgttgttgcaaagaagggtgttcaggtgagggctggcaaagggaaggtgttggtggatccacggatgaagaaggacaagcgggccagtgggactgggaagaagggtggcaaaggcgcaaaggggaagggtggccagaaaggcatgagagggaaagctgggaagaaggcagggaaagccccacggtaaacccagctttcttgtacaaagttggcattataagaaagcattgcttatcaatttgttgcaacgaacaggtcactatcagtcaaaataaaatcattatttgccatccagctgatatcccctatagtgagtcgtattacatggtcatagctgttt

SEQ ID NO: 552 - protein, 813 aa, Zea mays
MGKAKGKQRQDKFYHLAKEQGYRSRAAFKLLQLDARFHFLPTARSVLDLCAAPGGWVQVAVNHAPVGAFVVGVDLVPIRPIRGAHSLTEDITATKCRAAVRRLMDSNGVSAFDVVLHDGSPNVGGAWAQEATSQSALVIDALRLATMFLAPKGAFITKVFRSQDYNAIMYCLKQLFEKVEATKPTASRSTSAEIYIICLKYKAPAKIQPELLDIKHLFSVVPEQTKSRDVLDGRKKRHRDGYEEGNTTLRKVGLASDFIWSDTQAPLEFLGSYNAISFDNPESLPIKNHELTTDDIKNFCEDLLLLDKHSFKHILKWRIRLRKSLSASSQVTPKVNDAVESTKVMDDDVLLQEMEELTSVIDRKKKREKKRLSKRRAKDKARKATGMQVDATGDDYGDPDLFSISVIKGGKELEAVESAEIDVEDEIGDGDNEDTQALEDSDEEMDSDDEQQRYDAQLEEMLDEAYERFVTKKGGEIKQERKRAKRINPDADAELLEGGEDDGDVEMDQDFDEDQDQEANPLLFALDEQKPTKEQIVKQWYSQDVFTEAATGVTERSDTEDEREILQRNKKMDTGKREKVAKAQDLQHDGFEIVPAEPVQNEEDSSSSSDESEDDIDDYRKAEVLAYAKKMLRKKQREQILDDAYNKHMFDDEGLPNWFVEDEKRHRQPMKPVSREEVAAMRAQFKEIDARPSKKVAEAKARKKRVAMKKLDKARQKADAIADQNDINELSKRKMIDRIYRKAMPKKPQKEYVVAKKGVQVRAGKGKVLVDPRMKKDKRASGTGKKGGKGAKGKGGQKGMRGKAGKKAGKAPR

SEQ ID NO: 553 - DNA, 1067 bp, Zea mays
attgatgagcaatgcttttttataatgccaactttgtacaaaaaagcaggcttaaacaatggtgtggttccaatgcgaggactgtggcgagaacctcaagaagcccaaacttgccggccacttccgctcctgctccgcgtacaagctgtcatgcatcgattgcggcgagttattcagccaggacaccgtgcaggggcacacgcagtgcatctccgaggccgagaagtacggtcctaagggacagaccaaaccatccaatggtgcacagggtaaggcagataagccaaagccaaatgcagatgtcgatatcaatgttgggctgtcgacacggcctccttggttctgtagcctatgcaagaccactaccacaagcaagcaaactctcttactacatgctgatgggaagaagcatagggcaaaggcgaaagccttccatgtgtctcagaaacaaaaagatggtgcagaacaaactccagatgtgaaggaagctggagttgtacccacaaaagaatctgctcaagtaaatggtggcgtgagtggtgatcatgaaagaaatgaagataaagatgctgggaaaaggaaacgaatggatgacatgaccatagagccaggtaacacaaaaagacagttgacacagtctggagatgagaagtcagaaaacaaagcgaagagtaaggccgatgaactagcaagtggtactgactgcaaaagtgttcaaaagcaaaagatcaaatggaagaagattattactaaaacattgaaggcgaacgcagatggagttatgaagctaaagaagctacaaaagatagtctccaaggagcttcaggaatgtggtgtctccaaagacaaggaggagctccgtgctaccttgatggataaaatagcttcaagttccagattttctgttgatggcaagaatgttagactggtggccaagaatgaagaagaatcttagacccagctttcttgtacaaagttggcattataagaaagcattgcttatcaatttgttgcaacgaacaggtcactatcagtcaaaataaaatcattatttgccatccagctga

SEQ ID NO: 554 - protein, 298 aa, Zea mays
MVWFQCEDCGENLKKPKLAGHFRSCSAYKLSCIDCGELFSQDTVQGHTQCISEAEKYGPKGQTKPSNGAQGKADKPKPNADVDINVGLSTRPPWFCSLCKTTTTSKQTLLLHADGKKHRAKAKAFHVSQKQKDGAEQTPDVKEAGVVPTKESAQVNGGVSGDHERNEDKDAGKRKRMDDMTIEPGNTKRQLTQSGDEKSENKAKSKADELASGTDCKSVQKQKIKWKKIITKTLKANADGVMKLKKLQKIVSKELQECGVSKDKEELRATLMDKIASSSRFSVDGKNVRLVAKNEEES

SEQ ID NO: 555 - DNA, 2769 bp, Zea mays
atgttcagaaccttccagctgatgctcatgtcaatcattgcaatgactctcttcttccgtaccaagatgaagcatggcacggtgaatgacgggggtctctacatgggcgcactcttctttggtgtgcttatgatcatgttcaatggcttctctgagctggcactaactgtcttcaagctgcctgtattcttcaagcagagggatctccttttctttccagcatggtcctatactataccctcatggatcctcaaggtacccatcacatttatcgaggttggtggttatgtattcttgacatactatgtcattgggttcgacccaaatgtcggcaggttcttcaagcagtatctgcttctgttagtagtcaatcagatggcagcatcactcttccggtttattggtggggtatcgaggaacatgattgttgctaatgtcttcgcatcgttcatgttgctagttgtcatggtgttgggaggatttattctagtaagagataaagtgaagaaatggtggatctggggctactggatctccccaatgatgtatgcacaaaatgccatttcagtgaatgagatgttgggccacagctgggacaaaatattgaatagcactgcatccaacgagaccctaggtgtgcaagtccttaagtcgcgtggagtattcaccgaagcaaagtggtactggattggctttggtgctatggttggtttcaccatactcttcaacgctctcttcactgttgcccttacatatcttaagccatatggcaactcccggccatctgtatccgaagaggagctgaaggagaagcatgcaaacatcaaaggggaggttctggatggcaatcacttggtatcagcaagcagtcatcgatcaacaggagttaaccctgaaactgattcagcaatcatggaagatgattctgccttgactaaaaggggaatgatcctcccatttgtcccgctctcgctcacctttgacaacatcaaatactctgttgacatgccacaggaaatgaaagctcaaggtgtacaagaagatcgtttggagctcctcaaaggtgtcagtggatcttttaggccgggtgtgttgaccgcactgatgggcgttagcggtgcaggaaaaactactttgatggatgtgttggctgggagaaagacaggtggatacattgaaggagacatccgtatttcaggatacccaaagaaacaagacacctttgcacgtgtatcaggatactgtgaacaaaatgatatccactcgccacaggtgacagtctatgagtccctgcttttctcagcatggctccggcttcccaaggacgtcgattcaaacaaaagaaagatcttcattgaggaggtgatggagcttgtggagctgaaaccactgagaaatgctttggttggacttcctggagtgaatggtctgtcaactgagcagaggaaaaggcttaccattgctgtggaacttgttgcaaatccatctatcatctttatggatgagccaacctcagggcttgatgcccgagcagctgcaattgtgatgcggacggtgaggaacactgtcgatactggtagaactgtggtctgcacgatacatcagcctagcattgacatatttgaagcatttgatgagcttttcctcatgaagcgtggtggagaagagatctatgctggtccacttggacatcattcttcagatctaatcaagtattttgagtcacttcatggggtcagcaaaattaaagatggctacaatccagcaacatggatgctggaagtgaccacaacttctcaggaacagattctaggtgttgatttcagtgacatatacaagaaatctgaactctaccagaggaacaaggccttgataaaggaattgagccaaccagcaccaggttcaactgacctgcatttccctagcaagtatgcgcagtcttccattacacaatgcgtggcttgcctatggaagcagaacctgtcatactggaggaaccctccttacaataccgttaggttctttttcactaccatcattgctctcctccttggcaccatcttttgggacctcggcggcaaaacgtatacatcacaagacttgatgaatgccatgggatcaatgtactctgcggtgctgttcattggagtcatgaattgtacctcagttcagccagtggtggccgtggagcgaacagtcttttaccgtgaaagagctgctggcatgtactcagctttcccatacgcgtttggccaggttgtcattgagcttccatacgcactggctcaggatatcctttacggtgtcatagtgtactctatgatagggttcgagtggacggctgctaagttcttctggtacctcttctttgggtacttcacgctgctctacttcacattctacggcatgatggccgtggggctgacacctaactaccacatcgccgcgatcgtctcctcggcattctacgccatctggaacctcttctccgggttcatcatcccccgaccgaaagtgccgatctggtggaggtggtactgctggatatgccccgtggcgtggacgctgtacgggctggttgtgtcacagttcggtgacgtcatgactccgatggacgacggaagggccgtgaaggtgttcgtcgaggactacttcgacttcaagcacagctggcttgggtgggtggccgccgtggtggtggcgttcgccgtgctctttgcgaccctgtttggctttgccatcatgaagcttaacttccagaagagataa

SEQ ID NO: 556 - protein, 922 aa, Zea mays
MFRTFQLMLMSIIAMTLFFRTKMKHGTVNDGGLYMGALFFGVLMIMFNGFSELALTVFKLPVFFKQRDLLFFPAWSYTIPSWILKVPITFIEVGGYVFLTYYVIGFDPNVGRFFKQYLLLLVVNQMAASLFRFIGGVSRNMIVANVFASFMLLVVMVLGGFILVRDKVKKWWIWGYWISPMMYAQNAISVNEMLGHSWDKILNSTASNETLGVQVLKSRGVFTEAKWYWIGFGAMVGFTILFNALFTVALTYLKPYGNSRPSVSEEELKEKHANIKGEVLDGNHLVSASSHRSTGVNPETDSAIMEDDSALTKRGMILPFVPLSLTFDNIKYSVDMPQEMKAQGVQEDRLELLKGVSGSFRPGVLTALMGVSGAGKTTLMDVLAGRKTGGYIEGDIRISGYPKKQDTFARVSGYCEQNDIHSPQVTVYESLLFSAWLRLPKDVDSNKRKIFIEEVMELVELKPLRNALVGLPGVNGLSTEQRKRLTIAVELVANPSIIFMDEPTSGLDARAAAIVMRTVRNTVDTGRTVVCTIHQPSIDIFEAFDELFLMKRGGEEIYAGPLGHHSSDLIKYFESLHGVSKIKDGYNPATWMLEVTTTSQEQILGVDFSDIYKKSELYQRNKALIKELSQPAPGSTDLHFPSKYAQSSITQCVACLWKQNLSYWRNPPYNTVRFFFTTIIALLLGTIFWDLGGKTYTSQDLMNAMGSMYSAVLFIGVMNCTSVQPVVAVERTVFYRERAAGMYSAFPYAFGQVVIELPYALAQDILYGVIVYSMIGFEWTAAKFFWYLFFGYFTLLYFTFYGMMAVGLTPNYHIAAIVSSAFYAIWNLFSGFIIPRPKVPIWWRWYCWICPVAWTLYGLVVSQFGDVMTPMDDGRAVKVFVEDYFDFKHSWLGWVAAVVVAFAVLFATLFGFAIMKLNFQKR

SEQ ID NO: 557 - DNA, 1344 bp, Zea mays
caaataatgattttattttgactgatagtgacctgttcgttgcaacaaattgatgagcaatgcttttttataatgccaactttgtacaaaaaagcaggcttaaacaatggccaccctcaaccctttcgaactcctcggcgccgacgacaacgacgacccgtcgctgttgattgcggcggcggcggctgctgctcagaaagccgaggcgaagaagtccgccgtggcgcctgctgggaaggctgcccagcctgcggcgaccaccaagttcccgaccaagcccgctcctccctcgcagacggttcgggatgcacgcggcggtggctcatcagctcgtggaggctttggccgtggtgaacgtggccgtggcagaggtggacggggatatggtcagaaccgtggcttcagtggtgacaatggcaatgagttccagggaggttatggtggcggaggctatggggatggtgctgtaactggtggatctgaaggagaaagggagagagacactcgtcccccgtaccgtggcggaggcagacgtggtggttacaggaatgttgagtttggtgatgactctgagaggccaccacggagaaactatgagcgccacagcgggactggccatggctatgagatgaagcgtgatggcgcagggcgtgggaactggggcactgccactgatgagcttattgcccaggatgcagaggactctccgaagatggaggaggctgctcctgttgctgagaaacaaggtgagcagatcgatgccccagcagcagatgagaacaaagataacaaggatgctactgcaaatgaggaggaagaaaaggaagaggacaaggagatgactctggaggaatttgagaaaataagagaggagaagaggaaagcactacttgcgttgaaggctgaggagaggaaagttgaagttgacaaggatctgcgttctctgcagccactttcaaacaagaaagaaaatgatgaagttttcattaagctgggttctgacaaggataagaagaaggaaaatgctgagcgtgatgagcgtgccaagaagtcggtgagcatcaacgagttcctgaaacctgctgaaggagaaaggtactacggcggccgtggccgtggaaggggccgtggggatcgtggtggttttagaggcggatacggagggggatacagtcgtggcccagctgctgctgctccatccattgaagatcaagctcagttcccaagccttggtgggaagtgaacccagctttcttgtacaaagttggcattataagaaagcattgcttatcaatttgttgcaacgaacaggtcactatcagtcaaaataaaatcattatttgc

SEQ ID NO: 558 - protein, 378 aa, Zea mays
MATLNPFELLGADDNDDPSLLIAAAAAAAQKAEAKKSAVAPAGKAAQPAATTKFPTKPAPPSQTVRDARGGGSSARGGFGRGERGRGRGGRGYGQNRGFSGDNGNEFQGGYGGGGYGDGAVTGGSEGERERDTRPPYRGGGRRGGYRNVEFGDDSERPPRRNYERHSGTGHGYEMKRDGAGRGNWGTATDELIAQDAEDSPKMEEAAPVAEKQGEQIDAPAADENKDNKDATANEEEEKEEDKEMTLEEFEKIREEKRKALLALKAEERKVEVDKDLRSLQPLSNKKENDEVFIKLGSDKDKKKENAERDERAKKSVSINEFLKPAEGERYYGGRGRGRGRGDRGGFRGGYGGGYSRGPAAAAPSIEDQAQFPSLGGK

SEQ ID NO: 559 - DNA, 814 bp, Zea mays
cgttaacgctagcatggatgttttcccagtcacgacgttgtaaaacgacggccagtcttaagctcgggccccaaataatgattttattttgactgatagtgacctgttcgttgcaacaaattgatgagcaatgcttttttataatgccaactttgtacaaaaaagcaggcttaaacaatggagcacaaggaggctgggtgccaggcccccgagggacccatcctctgcatcaataactgtggcttcttcggcagcgcggcgaccatgaacatgtgctccaagtgccacaaggagatgataacgaagcaggatcaggccaagctggctgcctcctctatcgacagcatcgtgaacggcagcgacgccgtcatggagccggttgttgctggcagcaacacggtagtagctgttgcccaagttgagttgcaaacaatgaacgtgcagcagcccgctgatgttgccggacccagcgagggggtggcggcgatctccaaaggggggaaggtagggccgaaccggtgcagcgcctgcaggaagagggttggacttacgggattcaactgccggtgtgggaacttgtactgcgcactccaccgctactccgacaagcacgactgcaagttcgactaccggactgctgccagggacgccattgccaaggctaatccggtggtgaaggcagacaagctcgacaagatctagacccagctttcttgtacaaagttggcattataagaaagcattgcttatcaatttgttgcaacgaacaggtcactatcagtcaaaataaaatcattatttgccatccagctga

SEQ ID NO: 560 - protein, 174 aa, Zea mays
MEHKEAGCQAPEGPILCINNCGFFGSAATMNMCSKCHKEMITKQDQAKLAASSIDSIVNGSDAVMEPVVAGSNTVVAVAQVELQTMNVQQPADVAGPSEGVAAISKGGKVGPNRCSACRKRVGLTGFNCRCGNLYCALHRYSDKHDCKFDYRTAARDAIAKANPVVKADKLDKI

SEQ ID NO: 561 - DNA, 2004 bp, Zea mays
aatgattttattttgactgatagtgacctgttcgttgcaacaaattgatgagcaatgcttttttataatgatgccaactttgtacaaaaaagcaggcttaaacatggggttctgggtagggctggtgttgggggttgcggcgggcctcgccctcatcgtcggcttcgtccgctgcgagaattctcgctccgcccgtcggcgacaactggctgctaccgttgctagtttctcaagaatgacgattgaagattcacgaaagttactccctgctgacctatacccttcttgggttgttttctcatcgcagcaaaagttaaaatggcttaatcaggagctgacaaagatttggccatttgtaaatgatgcggcgtcagaactgatcaaaacctctgtagagcctgttcttgaacaatataggccaataatcattgcgtccctgaagttctcaaaactcactcttggtactgttgcaccacagtttaccggtatttcgatcattgagaatactaaggaatcaggtattgtcatggagctagagatgaattgggatgccaatccaagtatcatacttgctgtaaaaactagacttggtgtcgcgcttccaatacaggtgaaggacattggctttacaggagttttccgcttaattttcaaaccactaattgaagagctaccttgctttggagctgtttgcttttctctacgacagaagaaaaagctggatttccgactgaaggtcattggcggcgaaatttctgctgtacctggaatttcagatgctcttgaggacactataaaaaatgctattgaggactcaataacatggccagtaaggaaagtcattcctattatacctggggactacagtgatctggaactgaagcctgttggtaccttggaggtcaagcttgtgcaggcaagagatttgacaaacaaagatctgataggaaaatcggatccttttgccattgtatatgtgcgaccattaccagacaaaatgaagagaagtaaaacaattaacaacgatctgaaccctatctggaatgaacactttgagtttactgttgaagatgctgatactcagagtgtaaccgtgaagatttatgatgatgatggcattcaagaatctgaattgattggctgtgctcaagtcaggctgaaggatctacagccaggcaaagtgaaggatgtctggttaaaacttgtaaaagatctggagattcaaagggacaggaaagatcggggtcaggtgcaccttgagctgctatactgtccatttgacatgaaggatgaggctccaaaccctttcagccaacatttttcgatgacttcattggagagaacattgacaaacatggaaaatggatcggggggctctagttttgataggctgtcttcaagaaagaaaagggaaattatcatacgaggagttctttcagtaacagtgatatctggggaggatctgcctgcgatggatatgaatggaaaatctgacccatatgtcatactttctctcaagaagacaaagacaaagtacaagacaagggttgtgaccgaaagcttgaacccagtatggaatcaaacttttgattttgtcgttgaagatggcttacatgacatgcttatgttggaagtatatgatcatgacactttccgtagagattacatggggcggtgcatcctgaccttgacaaaagttttgctggaggaagagtacaaggaaagcttcaacctggagggagcgaagagcgggaagctgaacttgcatctgaagtggtcgccacagccaatcatgcgtgattcgcgtgaagcgggcagcttaaggtcaagataaacccagctttcttgtacaaagttggcattataagaaagcattgcttatcaatttgttgcaacgaacaggtcactatcagtcaaaataaaatcattatttgccatccagctgatatcccctatagtgagtcgtattacatggtcatagctgtttcctggcagctctggccc

SEQ ID NO: 562 - protein, 588 aa, Zea mays
MMPTLYKKAGLNMGFWVGLVLGVAAGLALIVGFVRCENSRSARRRQLAATVASFSRMTIEDSRKLLPADLYPSWVVFSSQQKLKWLNQELTKIWPFVNDAASELIKTSVEPVLEQYRPIIIASLKFSKLTLGTVAPQFTGISIIENTKESGIVMELEMNWDANPSIILAVKTRLGVALPIQVKDIGFTGVFRLIFKPLIEELPCFGAVCFSLRQKKKLDFRLKVIGGEISAVPGISDALEDTIKNAIEDSITWPVRKVIPIIPGDYSDLELKPVGTLEVKLVQARDLTNKDLIGKSDPFAIVYVRPLPDKMKRSKTINNDLNPIWNEHFEFTVEDADTQSVTVKIYDDDGIQESELIGCAQVRLKDLQPGKVKDVWLKLVKDLEIQRDRKDRGQVHLELLYCPFDMKDEAPNPFSQHFSMTSLERTLTNMENGSGGSSFDRLSSRKKREIIIRGVLSVTVISGEDLPAMDMNGKSDPYVILSLKKTKTKYKTRVVTESLNPVWNQTFDFVVEDGLHDMLMLEVYDHDTFRRDYMGRCILTLTKVLLEEEYKESFNLEGAKSGKLNLHLKWSPQPIMRDSREAGSLRSR

SEQ ID NO: 563 - DNA, 1773 bp, Zea mays
acgttgtaaaacgacggccagtcttaagctcgggccccaaataatgattttattttgactgatagtgacctgttcgttgcaacaaattgatgagcaatgcttttttataatgccaactttgtacaaaaaagcaggcttaaacaatggctcagatgatctccaccatgcccatgctggacgccgccccggcctcgtcagccattatgcccaagctgccggccgccgcctgcctggacgcgccgccctcgggcatcaccgtcgtgtccaggcagcacgtgcgcccggacgccgcgtcggcggtcggtgacctcacgctctccgtctccgacctgcccatgctgtcgtgccactacatccagaaggggctcttcttcccggcacccgacctgcccatgtcctcggtcgtgtcgctgctcctgtcctcgctgtcgcgggcgctcgccgtcgtcccggccctcgccggccgcttcgtcacgctgcccgacgaccgcatcgtcatccgctgcaacgacgcgggcgtggacttcctccacgccgtcgcacccggcctgtcgcttgacgactttctcgtccctgacgccgacgtgccgaccaagcacacaaaggacctgttccccatggaccggaccgtgagctacgaggggcaccgtcgcccgctcacgtcgttccaggtcaccgcactcggagacggcaccgtctttatcggcatcgtcgccaaccacgccgtcgtggacggcacctctttttggcaattcttcaatacctgggcggccatctgccgcggcgagtcccccaaactgccggacttccgccgaagcttcttcggcgagtccactgccgtcctccgcttccccggcggcgtcggcccgtccgtgaccttcgacgtggacgcgcctctccgtgagcgcgtctttcacttcagcgctgacgcaattcgcgagctgaaagcgattgccaaccgccgtccgagcggtggccaagacgccgaggtttacggcaagatggcgcaggaccccaagaatccccaagtgcgcggggagatctcgtcgttccagtcactgtgcgcgcagatatggctctcggtcacgcgtgcccggaaacgcctggcgcccgacgcgacgacgacgttccgaatggcggtgaactgccggcaccggctgcagccgcccatctctcctgtctactttggcaacgccatccagagcgctgcgacgatggcgacagtctccgagctggctcgcagcgatctaaggtgggcggcaggcaagctgaacgcgacccttgcggcctatggcgacggcacgatccggcgcgcggcggccgcgtggcaggccgcaccccggtgctccccgctgggcaaccccgacggctcggtgatcacgatggggagctcgaaccggttcccgatgtacgtgggcaacgatttcggctggggccggcccctcgctgtgcggagcgggcgcgccaacaagttcgacggcaagatgtcggcgttcccgggacgagccggggacggcagcgtggacatcgaggtgtgcctgcctccggagaccatggcggcgctgctccacgacgccgagtttatgcactacgtgtcgtgcccgtcgcatctgttgtgaacccagctttcttgtacaaagttggcattataagaaagcattgcttatcaatttgttgcaacgaacaggtcactatcagtcaaaataaaatcattatttgccatccagctgatatcccctatagtgagtcgtattacatggtcatagctgtttc

SEQ ID NO: 564 - protein, 491 aa, Zea mays
MAQMISTMPMLDAAPASSAIMPKLPAAACLDAPPSGITVVSRQHVRPDAASAVGDLTLSVSDLPMLSCHYIQKGLFFPAPDLPMSSVVSLLLSSLSRALAVVPALAGRFVTLPDDRIVIRCNDAGVDFLHAVAPGLSLDDFLVPDADVPTKHTKDLFPMDRTVSYEGHRRPLTSFQVTALGDGTVFIGIVANHAVVDGTSFWQFFNTWAAICRGESPKLPDFRRSFFGESTAVLRFPGGVGPSVTFDVDAPLRERVFHFSADAIRELKAIANRRPSGGQDAEVYGKMAQDPKNPQVRGEISSFQSLCAQIWLSVTRARKRLAPDATTTFRMAVNCRHRLQPPISPVYFGNAIQSAATMATVSELARSDLRWAAGKLNATLAAYGDGTIRRAAAAWQAAPRCSPLGNPDGSVITMGSSNRFPMYVGNDFGWGRPLAVRSGRANKFDGKMSAFPGRAGDGSVDIEVCLPPETMAALLHDAEFMHYVSCPSHLL

SEQ ID NO: 565 - DNA, 1570 bp, Zea mays
aataatgattttattttgactgatagtgacctgttcgttgcaacaaattgatgagcaatgcttttttataatgccaactttgtacaaaaaagcaggcttaaacaatgatggggtgcctcttcgcctgcttccgcgcgtccggcggcgatggcgaggtgaagggcaccggcggccagctcgcgcatccgtcccagccccccgcgacgacgacgacgaccagccaccaggtccaggatggcgcgggcaggagggccaggccgccgtcgaggaacgcgctctccgccgtgttccagcgagaagatgagggatcaaggacggcgcaagtggcgagctcgtgggcggacgagggtggcgagaggaaggagatggatcaggagcttgtgcatcaggccattatccaaagaagctgtggtgcgttgctgcaaactacaaataacattcaaggagcgctcatcaaatatgctgattcagttcatcagaaggaaacacattcaggatgtcttcctgttgtgtctgatgatctacatttcatggaagcgccgaaggttgagaaatgtgaaactccttcaaggtctcatcagagtttcactgttccagatgcaacgagttcttcaaaaacaaacgatgagttgcagacttccgctacttcccttgcaaataatgtgaaagattcgatgaatgagaacaacatggaggcacttgtgcaggatgaagagcaacaccaagctctggatcttgaagaatgtggggtctcaaaagaagaatcctttcaccctgaaaaaacagaggaaccaaagtgcgcaaagaatcaccatgtggtctccatggaaatttcaatatctgatgaatgctcccttttccagagctctgagggttctgtaccatcttcttacaagataagagagagcatgaacacaacatctgtggagaagtccccgaaaactgaggcaactatccatgccaccagaaagaagttaccgaagagcgataattcagaactggagctcccaagcttagcccaatggttgaagcccccaaatcctaagaagacattcagagatgaggccatggcaggagacaggtctcattcgggtaagagttcagatgaggataggcctattattggaatggttgcagcacattggaaagataaggtgccactgccagcaaattttacctctaaattgcgggatggaaatggcattcccaattcaacaaataagtacaaagaagaccaaaaggtgagttggcatgcaacgccatttgaggagaggctcgagaaggctttatccgaagagaagttgctgtctgaaaggagctgttcgagtggaaagacgtctcagtttttaggagtggaaggcgaggagagtgacatggccgaatctaaccgtctgtacaccactgcttatgcatgccaattcagttctgctagccatgagccacagaagctttcagtataaacccagctttcttgtacaaagttggcattataagaaagcattgcttatcaatttgttgcaacgaacaggtcactatcagtcaaaataaaatcattatttgccatccagct

SEQ ID NO: 566 - protein, 451 aa, Zea mays
MMGCLFACFRASGGDGEVKGTGGQLAHPSQPPATTTTTSHQVQDGAGRRARPPSRNALSAVFQREDEGSRTAQVASSWADEGGERKEMDQELVHQAIIQRSCGALLQTTNNIQGALIKYADSVHQKETHSGCLPVVSDDLHFMEAPKVEKCETPSRSHQSFTVPDATSSSKTNDELQTSATSLANNVKDSMNENNMEALVQDEEQHQALDLEECGVSKEESFHPEKTEEPKCAKNHHVVSMEISISDECSLFQSSEGSVPSSYKIRESMNTTSVEKSPKTEATIHATRKKLPKSDNSELELPSLAQWLKPPNPKKTFRDEAMAGDRSHSGKSSDEDRPIIGMVAAHWKDKVPLPANFTSKLRDGNGIPNSTNKYKEDQKVSWHATPFEERLEKALSEEKLLSERSCSSGKTSQFLGVEGEESDMAESNRLYTTAYACQFSSASHEPQKLSV

SEQ ID NO: 567 - DNA, 3336 bp, Zea mays
aatggcaggccaccaccgcgcccgccgagtaaacggcacgcgcgcgcccccgcgccggccgtcggcggaaaaaatcacgcggagccggagccaccccgaaaagccacgcacgtcgccaacaaccgttctacgcgtccagcccctgctgtgcgcctgcgtctggctcgccctgctgctggcgtgcctcccgcgccaggccgcggcgcaggacgccgaggcgcggctgctgctgcagatcaagagcgcgtggggcgacccggcgccgctcgcgtcgtggagcaacgcgaccgcggcggcgccgctcgcgcagtgcagctgggcctacgtgctctgcgacggggccgggcgggtcagctcgctcaacctcaccaacgtcacgctggccggccgcaccatccccgacgccatcggcgggctcacggccctcacggtgctcgacctgtccaacaccagcgtcggcgacggcttccctgcgtccctctacaactgcgccgccatcgcgcgcctcgacctctcccacaaccagctcgccggggacctcccggccgacatcgaccggctcggcgccaacctgacctgcctcgccctggaccacaacaacttcaccggcgcgataccggcggcggtgtccaggctcaccaacctcacgtacctcgctctcggcggaagccagctcaccggcaccatcccgccggagctcggccagctggttaaccttcggacgctcaagctcgagaggactcccttcagtgccggcacgctgccggagtcgttcaagaacttgaccaagctaacgaccgtctggctggccaagtgcaacctcaccggcgagatcccgagctatgtcgcggagctggcggagatggagtggctcgacctgtccatgaatggactcaccggaaacataccgtccgggatatggaacctccagaagctgacgaatctgtacctgtacaccaacaacctctccggcgacatcgtcatcaacaacgggacgataggagcggcaggtttggtagaggttgacctgtccgagaacatgctgactgggaccatcccaggaagcttcggaagcttgacgaagctaaggctcctcattttgcacgacaacaatctcgtcggcgagataccggcaagcatagcccagctaccgtccttggtatacttgtggctgtggagcaacagccccagcggagagctcccgccggggctcggaaaggagacgccggtgctgagagatatccagatcgacgacaacaacttttccgggccaataccggcggggatctgtgagcacaaccagctgtgggtgctcaccgcccccggtaaccgcttgaacggctcaataccgaccggtcttgccaactgctcgagtctcatatggttgttcctcggaggtaaccagctgtccggcgaggtgccggccgctctatggacggtgccgaagcttctgaccgtgtcgttggagaacaatggacggttgggcgggagcctgccggagaagctgtactggaacctgtcgaggcttagcatcgacaacaaccagttcaccggaccgattcctgcatcggctactaatctcaagcggttccacgccagcaacaacttgttctccggcgacatatcaccggggttcaccgctgcgatgccccttctgcaggagctggacctgtcggcgaaccagctgtctggggcaatcccacagagcattgcgtcgctcagtggcatgtcgcagatgaacttaagccataaccagctcaccggcggcataccggcggggttaggctcgatgccggagctcaccctgctggacctttcgtcaaaccagctttccggcgccataccgccggcgctgggaacgctgagggtcaaccagcttaatctgtcctccaaccagctcaccggcgaggttcccgatgcgctcgcccgtacctacgaccaaagcttcatgggcaatccaggcctctgcaccgccccgccggtgtcgggcatgcgctcgtgcgcggccccgtcaaccgaccatgtctcgccgcgtctccgtgcgggcctcctcgccgcgggcgccgcgctcgtcgtcctcatcgcggcgctcgccgtcttcgtcgtccgcgacatcaggaggcggaagcggcggctcgcgctggctgaggagccctggaagctcaccgctttccagcccgtggacttcggcgaggcctccgtgctgcgcgggctcgccgacgagaacctcatcggcaagggcggctcggggcgcgtgtaccgcgtcacgtacaccagccggagcagcggcgaagcggcgggcaccgtggccgtgaagcgcatctgggccggcgggagtctggacaagaagctggagcgcgagttcgcgtcggaggtggacatcctcggccacatccggcacagcaacatcgtgaagctcctctgctgcctctcccgcgcggagaccaagctactcgtctacgagttcatgggcaacggcagcctggaccagtggctgcacggccacagcaggctggccgggaccgggactgccatggtcagggccccgtcggtccggcgtgagccgctggactggccgacgagggtcaaggtggccgtcggcgccgcgcgcgggctgtactacatgcatcatgagtgctcgccgcccatcgtgcaccgcgacgtcaagtccagcaacatcttgctcgactcggagctcaatgccaaggtcgccgatttcgggctcgcccggatgttggtccaggccggcacgaccgacacgatgaccgccgtcgccggatcgttcggctacatggctcccgagtccgtgtacacgaggaaggtgaacgagaaggtcgacgtgtacagcttcggggtcgttctcttggagctgaccaccggtagattagccaacgacggcggtgagcacggctccctggccgactgggcgtggcggcacctgcagtccggtaaaagcatcgccgaggccgcagacaagtccatcgcggacgccggttacggtgaccaagtcgaggccgtcttcaagctcggcattatatgcaccggtcgccagccgtcctcgcggccgacgatgaagggtgtgcttcagatactgcagcggtgcgagcaggcgcaccagaggaccttcgacgagaaggtcgccgactacgacgccgctccgctgctgcaggtgcatggaggtagccgccggaaacaactctccgatgccgaagtgatcgacgacgatgggaagggcagtttcgactgcaatgtctgaacccagctttcttgtacaaagttggcattataagaaagcattgcttatcaatttgtgcaacgaacaggtcactatcagtc

SEQ ID NO: 568 - protein, 1084 aa, Zea mays
MAGHHRARRVNGTRAPPRRPSAEKITRSRSHPEKPRTSPTTVLRVQPLLCACVWLALLLACLPRQAAAQDAEARLLLQIKSAWGDPAPLASWSNATAAAPLAQCSWAYVLCDGAGRVSSLNLTNVTLAGRTIPDAIGGLTALTVLDLSNTSVGDGFPASLYNCAAIARLDLSHNQLAGDLPADIDRLGANLTCLALDHNNFTGAIPAAVSRLTNLTYLALGGSQLTGTIPPELGQLVNLRTLKLERTPFSAGTLPESFKNLTKLTTVWLAKCNLTGEIPSYVAELAEMEWLDLSMNGLTGNIPSGIWNLQKLTNLYLYTNNLSGDIVINNGTIGAAGLVEVDLSENMLTGTIPGSFGSLTKLRLLILHDNNLVGEIPASIAQLPSLVYLWLWSNSPSGELPPGLGKETPVLRDIQIDDNNFSGPIPAGICEHNQLWVLTAPGNRLNGSIPTGLANCSSLIWLFLGGNQLSGEVPAALWTVPKLLTVSLENNGRLGGSLPEKLYWNLSRLSIDNNQFTGPIPASATNLKRFHASNNLFSGDISPGFTAAMPLLQELDLSANQLSGAIPQSIASLSGMSQMNLSHNQLTGGIPAGLGSMPELTLLDLSSNQLSGAIPPALGTLRVNQLNLSSNQLTGEVPDALARTYDQSFMGNPGLCTAPPVSGMRSCAAPSTDHVSPRLRAGLLAAGAALVVLIAALAVFVVRDIRRRKRRLALAEEPWKLTAFQPVDFGEASVLRGLADENLIGKGGSGRVYRVTYTSRSSGEAAGTVAVKRIWAGGSLDKKLEREFASEVDILGHIRHSNIVKLLCCLSRAETKLLVYEFMGNGSLDQWLHGHSRLAGTGTAMVRAPSVRREPLDWPTRVKVAVGAARGLYYMHHECSPPIVHRDVKSSNILLDSELNAKVADFGLARMLVQAGTTDTMTAVAGSFGYMAPESVYTRKVNEKVDVYSFGVVLLELTTGRLANDGGEHGSLADWAWRHLQSGKSIAEAADKSIADAGYGDQVEAVFKLGIICTGRQPSSRPTMKGVLQILQRCEQAHQRTFDEKVADYDAAPLLQVHGGSRRKQLSDAEVIDDDGKGSFDCNV

SEQ ID NO: 569 - DNA, 1360 bp, Zea mays
tccctactctcgcgttaacgctagcatggatctcgggccccaaataatgattttattttgactgatagtgacctgttcgttgcaacaaattgatgagcaatgcttttttataatgccaactttgtacaaaaaagcaggcttaaacaatggccacttctggcgagcaatcggctggcggtgggtctgcggcgagggcgtcgaagctgcgctacccgctgcggtcggcgagcaaggggaaggccgcggccgtttccccggcggcggatgcgcctcccaccaccatctctgctccgcgtcgggtaaagccatcttcagatgtcagcaagagcatgtgtttagacctttctgtgaaggataagtctgtcaagcctccacggaggcactcaatacaaactaagccaggagctagcccaaggccaataccttctggaactgtgactccggtgtctggggttcggtcaaagagatcggacggccaggggaggtttgatactccgacatcagaagtgtccatgtccatgtcaaggcgcaagttcagcacgctttcttcaatctcgtactggatgacacagatcaggcttgcagaggctgcttccaaacactcagtttctctgggcttctttaagcttgctcttgaatcagaatgtgagcctttggaccggatgagggaagaactcaagtcccatgtagtccgccattgcttagcgacagaattggaggacccagtcaaggacattcttcaggtttatgatattgtggacgattttgagaagctgaagatctctgcagagccctcagagcaacaaaaaaagtctgaaaaggctgctcgtaatgtctccaatgtgtcagccaattgtaatctgaagccaaggtcactaaactctggtgctactgaaagtaaggaagctgggaagaaagagggcattcagaaagcgaaacctgatgcaagggtcagaggctccaataacaggaatccagtaaaatgcaccaccgcaaaggaagtagttgctaagaacactggtaagaaaaccaagaaagaggccaagggtcaggaggaagttagcaatggagatagcgatgcatcctcagcccttccagatcaggaatctgttgatgttgtgaaggagatcacccatgaagataaagagaacatggacgagaatgaaatggctatggatgttgccatagcgcaagaattctagacccagctttcttgtacaaagttggcattataagaaagcattgcttatcaatttgttgcaacgaacaggtcactatcagtcaaaataaaatcattatttgccatccagctgcagctctggcccgtgtctcaaaatctctgatgttacattgcacaaga

SEQ ID NO: 570 - protein, 351 aa, Zea mays
MATSGEQSAGGGSAARASKLRYPLRSASKGKAAAVSPAADAPPTTISAPRRVKPSSDVSKSMCLDLSVKDKSVKPPRRHSIQTKPGASPRPIPSGTVTPVSGVRSKRSDGQGRFDTPTSEVSMSMSRRKFSTLSSISYWMTQIRLAEAASKHSVSLGFFKLALESECEPLDRMREELKSHVVRHCLATELEDPVKDILQVYDIVDDFEKLKISAEPSEQQKKSEKAARNVSNVSANCNLKPRSLNSGATESKEAGKKEGIQKAKPDARVRGSNNRNPVKCTTAKEVVAKNTGKKTKKEAKGQEEVSNGDSDASSALPDQESVDVVKEITHEDKENMDENEMAMDVAIAQEF

SEQ ID NO: 571 - DNA, 1150 bp, Zea mays
aatgtctgtctcggagaaggtggcgccatcgaagtcatcagtttcttcgtcgtcagatttggatccgctgctgaaggatctcacggagaagaagttgacctttaggaggaacgtggtgtcattggcagctgagctcaaggatgcgaggaacaagcttgcctcccaggagcagctgtttgtaaaggaatctcaaactagaaaggttgttgagacaaaggcaaggagcatggaagaggaagtaagcaagctgcagaaatgcttgcaggacaaggatgagcaactgcgttcatccgcaagtagcacggaacagtacctccatgagttggatgatcttagaacacaactgtcaattactcaagctacagcagaagcgagtgctgcatcagccaagtcagctcaggtgcagtgcttgtcattgctgaaagagctgaatgagaaggacatctcgctcaaagagcatgagcttcgagtgaacaagctaggtgagcagctcgatcttctccagaaggatctacaagcaagggagctctcacaaatgcaacttaaggatgaagttctaagaattgagaccgacatcatggatgcaattgccaaagctgggtctaggtctgacaaagacaatgagcttttaaagatcttatctgacgtttcaccaaggaatgtccagaacctcaacagccttttgaatgctaagaatacagaaattgcgaggttgagagaggaaatcagaatattatctgctcactggacgaacaaaaccaaggaacttgaatcacagttagaaaagcagcgaagaactgatcaggagctgaagaagagggtcctgaagcttgaattttgccttcaagaatctcagtcccagatgcgaaaattaaagaggatgggggagaaaagagacaaggctctcaaggagctcatggaccaggtggccatgaagcagcccaacagcatgtgccatggaaacaaggataatttctgggagagccagggcttcaggttcattgcctctatgtcgatgctggcgctagtgatcctcgcaaagcgttgaacccagctttcttgtacaaagttggcattataagaaagcattgcttatcaatttgttgcaacgaacaggtcactatcagtcaaaataaaatgcatttccccc

SEQ ID NO: 572 - protein, 348 aa, Zea mays
MSVSEKVAPSKSSVSSSSDLDPLLKDLTEKKLTFRRNVVSLAAELKDARNKLASQEQLFVKESQTRKVVETKARSMEEEVSKLQKCLQDKDEQLRSSASSTEQYLHELDDLRTQLSITQATAEASAASAKSAQVQCLSLLKELNEKDISLKEHELRVNKLGEQLDLLQKDLQARELSQMQLKDEVLRIETDIMDAIAKAGSRSDKDNELLKILSDVSPRNVQNLNSLLNAKNTEIARLREEIRILSAHWTNKTKELESQLEKQRRTDQELKKRVLKLEFCLQESQSQMRKLKRMGEKRDKALKELMDQVAMKQPNSMCHGNKDNFWESQGFRFIASMSMLALVILAKR

SEQ ID NO: 573 - DNA, 1933 bp, Zea mays
cccaaataatgattttattttgactgatagtgacctgttcgttgcaacaaattgatgagcaatgcttttttataatgccaactttgtacaaaaaagcaggcttaaacaatgccttccggcgacgattccgaccccctgctggcgcccgccgacggcatacgcttcgcggcgctggactaccgcgaccaccccgccgaccgcggcgccaccggcggctggcggtcggcgctcttcatcatagcggtggagatctcggagcggttcacgttctatggcgtgtcgtcgaacctgatcaactacctcacgggcccgctcggagagggcaccgcggcggcggcggcggccatcaacacgtggaccggggtggcgcagctgccgccgctgctgggcggggccctcgcggacaagtggctcggccgctaccgcaccatcgtcgtcgcatcgcttctctatgtcatcggtgcaggcatgctggccttctcgaccttgctctcctccggcagcggccaccaatgcaccaccgccgggggccagacctgtgcgccgtccaccattaaggtgaccttcttctacgtctccctctacatcgtggccgtggcgcagggcggccacaagccgtgcgtccaggcgttcggcgccgaccagttcgatcagagcgaccccaaggagaccgtctccaggagctccttcttcaactggtggtacttcggcatgtgcgccggcaccgccgtcacgctcctgttcctcaactacgtgcaggacaacatcggatggggcctcggtttcggcattccgtgcgccgtcatggcagctgcgctcgccgtattccttctcggtacaaggaggtaccggtactacgtcactgccggggagcggggcctgttcgctcgtgccggcgaggcttttgttgagtggcggagcaggcgaaaggctcttcagcatggtgatcgacctgtagcagagggggcgccgggattcagcgctggtgtcgacgaggaggagcaggctgcagtcagccatgacgcaggcctcgtcaaggagaccaaggacatcctccgtctattcccgatatgggcgacgtgcctgctctacgcggtggcgttctcgcagtcgtcgacgttcttcacgaaacaggcggcgaccctggaccggcgcgtcgggcggcacttgcaggtaccaccggccgcgctgcagagcttcatcagcatcaccatcgtggtcttcatccccctctacgaccgcgtcctcgtgccggtggcgcgccggtactccggcaacccatccggcatcaccatgctgcagcgcatcgggacggggatgttcctctcgctcttgtccatggtgatcgcggcgctcgtcgagaagcaccggctccgcgtggcagtggacgctggcctcgtggacaagccaatggtccccctgccgatgagcctatggtggatggtgccgcagtacgtgctgttcggggccgccgacgtgtacaccatggtcgggctgcaggagttcttctacgatcaggtgcccgacaagctgcgcagcctcgggctggcactctaccttagcatcttcggcgtcggcagcttcatcagcagcacgctcgtgtcgatcatcgacagtgtgacgacggccaggggcgggagctggttcaccaacaacctgaaccgtggccacgtggactacttctactggctactcgccgcgctcagcgccctcgagctcctcgcctatgtcttcttcgcggtgacatacaagtacaagaacaaagcaaccgtgcatgcaactgttgttggtcagtcgctttagacccagctttcttgtacaaagttggcattataagaaagcattgcttatcaatttgttgcaacgaacaggtcactatcagtcaaaataaaatcattatttgccatccagctgcagctctggcccgtgtctc

SEQ ID NO: 574 - protein, 564 aa, Zea mays
MPSGDDSDPLLAPADGIRFAALDYRDHPADRGATGGWRSALFIIAVEISERFTFYGVSSNLINYLTGPLGEGTAAAAAAINTWTGVAQLPPLLGGALADKWLGRYRTIVVASLLYVIGAGMLAFSTLLSSGSGHQCTTAGGQTCAPSTIKVTFFYVSLYIVAVAQGGHKPCVQAFGADQFDQSDPKETVSRSSFFNWWYFGMCAGTAVTLLFLNYVQDNIGWGLGFGIPCAVMAAALAVFLLGTRRYRYYVTAGERGLFARAGEAFVEWRSRRKALQHGDRPVAEGAPGFSAGVDEEEQAAVSHDAGLVKETKDILRLFPIWATCLLYAVAFSQSSTFFTKQAATLDRRVGRHLQVPPAALQSFISITIVVFIPLYDRVLVPVARRYSGNPSGITMLQRIGTGMFLSLLSMVIAALVEKHRLRVAVDAGLVDKPMVPLPMSLWWMVPQYVLFGAADVYTMVGLQEFFYDQVPDKLRSLGLALYLSIFGVGSFISSTLVSIIDSVTTARGGSWFTNNLNRGHVDYFYWLLAALSALELLAYVFFAVTYKYKNKATVHATVVGQSL

SEQ ID NO: 575 - DNA, 1470 bp, Zea mays
atggaagaaggcttcaccggcggcgtccggatcgtgtccaggcgtctcgtccggccggagccgaccgcgagctcgccggacaacaacagcgcgccaccggaagaggaggaggatgagataatgcacatgacgccgtgggatctgcgcatgatcacggtggactacatccagaagggactgctcctgcccaagcccccggcagcaggcggggcacacgcgcaccgactcgtggacggcctcgcctcgtccttcgcacgcgccctggcccgcttctaccctctggccggccgcctcgccgtggatgccgccaccggcggcccgggcgtcgtcgtctcgctccgctgcagcggcgagggcgccgagttcgtccacgccgaggcgccggaggtcaccgtcagcgacatcatcacgctgcccgcaggccattactacgtccccagcgcgctggtctggtcgctcttcccgctgaacgggctgctgggcacggacgccgccctggacgacgactcccgcgcccccctgctatcggcgcaggtcaccgagctcgccgacggcgtcttcgtcgccatgtcgctgaaccacgccgtgggcgacgggaccacgttctggcacctgttcaacacctggtcggagatcagccgggcgggcggcgaggggcgcgaggcggagctctgcacgccgcggccggtgctggacaggtggttcctcgacacctgcccggtccccatcgctctgccgctgcgcaagctggaggacatcgtccggcagcccgagtacccgccggtgcgggagtgcttcttcgacttccctgcggagagcgtgcggaagctcaaggcgaaggcgaacgccgagattgcggcgggaggcggcaccgcgccggccgccgtcgtgctgtcgtctctgcagtccctgttcgcgcacctgtggcgggcggtgtgccgggcccgggagctcgcgccgggcgcggagacggcgtacctccttcccgtcgggtgccgcgcgagggtgcgaggcgtcccgcaggcgtacgtgggcaacgccgtgacgctcgccgtggcaaagtcgaccgccggcgaggtgctgggcggcgggctgggctgggcggcgttgctcttgaaccgcgccgtggcgtcgttcgacgaggcgggcgtgagggccgagctcgcggcgtgggcgcgcgaccctcggttcgcgtacgtggagccgcgcgggtacggcggcgccgcaacggtcgcgaccgggagctccccgcggttcgacgtctacggcaacgacttcgggtggggccggccgctggccgtccgcagcggcgccgggaacaagatggacgggaaggtgaccgtgtacgagggccgcggcggcgcgggcagcatggcgctggaggtgtgcctggagccccaggcgctcgccaggctcgtcgccgacgacgagttcatggaggctgtgactgtgagcgctgccgcgccgtga

SEQ ID NO: 576 - protein, 489 aa, Zea mays
MEEGFTGGVRIVSRRLVRPEPTASSPDNNSAPPEEEEDEIMHMTPWDLRMITVDYIQKGLLLPKPPAAGGAHAHRLVDGLASSFARALARFYPLAGRLAVDAATGGPGVVVSLRCSGEGAEFVHAEAPEVTVSDIITLPAGHYYVPSALVWSLFPLNGLLGTDAALDDDSRAPLLSAQVTELADGVFVAMSLNHAVGDGTTFWHLFNTWSEISRAGGEGREAELCTPRPVLDRWFLDTCPVPIALPLRKLEDIVRQPEYPPVRECFFDFPAESVRKLKAKANAEIAAGGGTAPAAVVLSSLQSLFAHLWRAVCRARELAPGAETAYLLPVGCRARVRGVPQAYVGNAVTLAVAKSTAGEVLGGGLGWAALLLNRAVASFDEAGVRAELAAWARDPRFAYVEPRGYGGAATVATGSSPRFDVYGNDFGWGRPLAVRSGAGNKMDGKVTVYEGRGGAGSMALEVCLEPQALARLVADDEFMEAVTVSAAAP

SEQ ID NO: 577 - DNA, 1045 bp, Zea mays
atgtctgtctcggagaaggtggtgctatcatcatcagtttcttcgtcgtcagatttagatccgttgctgaagggtcttacggagaggaagttgagctttaggaggaacgtggtgtcattggcagccgagctcaaggatgtgaggagcaagcttgcttcccaggagcagctgtttgtaagggaatctcaaactagaaagcttgtggatacaaaagcaaggagcatggaagaggaagtaagcaagttgcagaaatgcttacaggacaaggatgagcaactgcgttcatccacaagtagcacggaacagtacctccatgagttggatgatcttagaacacaactgtcatttactcaagctacagcagaagcaagtgctgcatcagctaagtcagcccagatgcagtgcttatcattgctgaaagagctgaatgagaaggacatctcgctcaaagagcacgggcttcgagtgaacaagctaggtgagcagcttgatcttctccagagggaactacaagcaagggagctctcgcaaatgcaacttaaagatgaagttataagaatcgagaccgacatcatggatgcagttgccaaagctgggtctaggtctgacaaagataatgagcttttaaagatcttatctgatgtttcaccaaggaatgtccagaacctcaacaaccttttgaatgctaaggatacagaaattgcgaggttgagagaggaaatcagaatattgtctgctcactggacgaacaaaaccaaggaacttgagtcacatttagaaaagcaccggagaactgatcaggagctgaagaagagggttctaaagcttgaattttgccttcaagaatcccagtctcagatgcgaaaattaaagaggatgggcgagagaagagacaaggctctcaaggagctcatggaccaggtggccacgaagcagccaaacagcatgtgccatggcaacaaggagaatttctgggagggccagggcttcaagttcatcgtgtctatgtcgatgctggcactagtgaacctcgcaaagcgatgaa

SEQ ID NO: 578 - protein, 347 aa, Zea mays
MSVSEKVVLSSSVSSSSDLDPLLKGLTERKLSFRRNVVSLAAELKDVRSKLASQEQLFVRESQTRKLVDTKARSMEEEVSKLQKCLQDKDEQLRSSTSSTEQYLHELDDLRTQLSFTQATAEASAASAKSAQMQCLSLLKELNEKDISLKEHGLRVNKLGEQLDLLQRELQARELSQMQLKDEVIRIETDIMDAVAKAGSRSDKDNELLKILSDVSPRNVQNLNNLLNAKDTEIARLREEIRILSAHWTNKTKELESHLEKHRRTDQELKKRVLKLEFCLQESQSQMRKLKRMGERRDKALKELMDQVATKQPNSMCHGNKENFWEGQGFKFIVSMSMLALVNLAKR

SEQ ID NO: 579 - DNA, 796 bp, Zea mays
cggccagtcttaagctcgggccccaaataatgattttattttgactgatagtgacctgttcgttgcaacaaattgatgagcaatgcttttttataatgccaactttgtacaaaaaagcaggcttaaacaatggggaacagcctccggtgctgcctggcgtgcatgatcccgtgcggcgcgctggacgtggtccgcgtggtgcacctcagcgggcgcgtcgacgagctggggtgcccgctcaccgcggccgacgtgctcgcggcgcaccccagccacgcgctcacggacgcgtggtccgcggccggcgcgtcccgcaaggtcgtcgtcctggcgcccgactccgagctcaagcgcggccgcatctacttcctcgtgccctccgccgcgtgctccacgccctccgccgccgccggcgccgagaggacgaagaagcgcaggagccgcgccagcagcaggaagaagcacggccaccggaagggcggtggcgcctctgtggcgccgtcgctgatgagcgcggcggagcaggacaactacctgcgcgagctcctgtcggagaagcgggaggcgagcctgatgagccaccgccggcggcggagcggcgcccgccccggcgtgtggcgcccgcggctggagagcatggctgaggagccgtcagagtagacccgctttcttgtacaaagttggcattataagaaagcattgcttatcaatttgttgcaacgaacaggtcactatcagtcaaaataaaatcattatttgccatccagctgatatcccctatagtgagtcgtattac

SEQ ID NO: 580 - protein, 176 aa, Zea mays
MGNSLRCCLACMIPCGALDVVRVVHLSGRVDELGCPLTAADVLAAHPSHALTDAWSAAGASRKVVVLAPDSELKRGRIYFLVPSAACSTPSAAAGAERTKKRRSRASSRKKHGHRKGGGASVAPSLMSAAEQDNYLRELLSEKREASLMSHRRRRSGARPGVWRPRLESMAEEPSE

SEQ ID NO: 581 - DNA, 432 bp, Zea mays
gccccaaataatgattttattttgactgatagtgacctgttcgttgcaacaaattgatgagcaatgcttttttataatgccaactttgtacaaaaaagcaggcttaaacaatggcgaatgatgatgaccctgtggacggcgaaaaccctagatcttttaccgcatcaatgataacaagatggcaaaaacattcgacgtggtttcagcgcacggccatcagctcaaaatggcgaccttcctcttctacgcaaacaaaactatcatcaaagcttcgcacacaagcttgcaggggtcacagtatcatcctagcctatgaaccggtgttatcctaaacccagctttcttgtacaaagttggcattataagaaagcattgcttatcaatttgttgcaacgaacaggtcactatcagtcaaaataaaatcattatttg

SEQ ID NO: 582 - protein, 73 aa, Zea mays
MANDDDPVDGENPRSFTASMITRWQKHSTWFQRTAISSKWRPSSSTQTKLSSKLRTQACRGHSIILAYEPVLS

SEQ ID NO: 583 - DNA, 492 bp, Zea mays
ttcgttgcaacaaattgatgagcaatgcttttttataatgccaactttgtacaaaaaagcaggcttaaacaatgcttgatactgccgttgcacgggcacgcaccccatcagggcaaaatcctctccagcaactgatactgataatatctgatggaaaattccatgaaaaggaaaacttgaggcgccatgttagagacgttctaaatcgaaagaggatggtcgcgtatgtgctcctggatagccccgaggattctattattaatctaaaggaagcatgcttcagagtaggggagaaggtagagctgaaaaaatacatggattcctttccgttcccgtattatgttatgctacagaacattgaagctcttcctcgcacattggccgacctgcttagacagtggtttgagctcatgcagagcgccaacgagtgaacccagctttcttgtacaaagttggcattataagaaagcattgcttatcaatttgttgcaa

SEQ ID NO: 584 - protein, 119 aa, Zea mays
MLDTAVARARTPSGQNPLQQLILIISDGKFHEKENLRRHVRDVLNRKRMVAYVLLDSPEDSIINLKEACFRVGEKVELKKYMDSFPFPYYVMLQNIEALPRTLADLLRQWFELMQSANE

SEQ ID NO: 585 - DNA, 474 bp, Zea mays
gtgacctgttcgttgcaacaaattgatgagcaatgcttttttataatgccaactttggacaaaaaagcaggcttaaacaatgaagccggtcatccgcaggacggagtcgcgcacgcggcgcaggtcccggcccttgagcgtgcggccctggccggagcacaccgaggacgccgccctgcgccgcgccagcagcacgtgcgggggcaccgcctcgccgtcgccttcgtctgcctggttcgtctcccgctccgcgacccgcgccgcccccgagatggccgggatcccgatgggctccgtggacggccggcgctgctcccgctcggcctgcgcccacgccgcgtcctgcgacatgtcttctcacagtgatcagatcaggtcaggtcagatcggcctcggcttgcgatgaacccagctttcttgtacaaagttggcattataagaaagcattgcttatcaatttgttgcaaggaacag

SEQ ID NO: 586 - protein, 108 aa, Zea mays
MKPVIRRTESRTRRRSRPLSVRPWPEHTEDAALRRASSTCGGTASPSPSSAWFVSRSATRAAPEMAGIPMGSVDGRRCSRSACAHAASCDMSSHSDQIRSGQIGLGLR

SEQ ID NO: 587 - DNA, 1038 bp, Zea mays
atggagaggattctagatattgaagtgctggaagcacctcgtgaagattctagttccacagagcctcgatcaaagaagatggagcgatatcttatcaagtggaaaggattatcatacattcactgctcttgggtttcagaaaaagaatattcagaagccgcgaatatacaccctcgtctgaggactaggttgaataacttcagaaggcaaaaggaagccatgaaaatagaagcagaaagatctggtgaggacatcgttgcaattagaccggagtggacaactgttgacaggatccttgctagcagaaaaaacttagttggcgatcgggaatactatgttaaatggaatgaacttacatatgaggaatgtacatgggaaaatgagtctgacatcacggtgttccaacctgagattgaacgcttcaatgagatccagttcaggcgtaagaaatctggtgacaagggcaaggccactcgggagccacgccaattcaaggagagccctacgtttctttctggtggcacactacatccctatcagcttgaagggttaaactttttgcgatattcgtggtttcataacaaacgcgtaatccttggtgatgagatgggtcttgggaaaacgatacaaagtattgcttttcttgcctcactctttgaagacaagtttggtccgcatctggtcgttgctcccctctcaaccctgcggaattgggagcgtgaatttgcaacttgggcacctcaaatgaatgttgtaatgtattttggagctgctgcttctcgtgacattattaggaagtacgagttttactacccaaaagagaaactgaagaagctgaagaaaaagaaatcttctccatctaatgaagataagaagcagtcaaggataagatttgatgtcttattgacgtcttatgagatgatcaacatggactcgtctattctaaaaaatatagaatgggagtgcttggtacttctattttgtttcagcatcatatctctgtccagttgtccatacatagcatgttttaagatttaa

SEQ ID NO: 588 - protein, 345 aa, Zea mays
MERILDIEVLEAPREDSSSTEPRSKKMERYLIKWKGLSYIHCSWVSEKEYSEAANIHPRLRTRLNNFRRQKEAMKIEAERSGEDIVAIRPEWTTVDRILASRKNLVGDREYYVKWNELTYEECTWENESDITVFQPEIERFNEIQFRRKKSGDKGKATREPRQFKESPTFLSGGTLHPYQLEGLNFLRYSWFHNKRVILGDEMGLGKTIQSIAFLASLFEDKFGPHLVVAPLSTLRNWEREFATWAPQMNVVMYFGAAASRDIIRKYEFYYPKEKLKKLKKKKSSPSNEDKKQSRIRFDVLLTSYEMINMDSSILKNIEWECLVLLFCFSIISLSSCPYIACFKI

SEQ ID NO: 589 - DNA, 377 bp, Zea mays
ttataatgccaactttgtacaaaaaagcaggcttaaacaatgaatcttgatacggcggaggcagaggtcgtgacactgagtgaggacaacagggctcttgatgaagagatcaaaaggctgctgagtttgttggagaaggagcgacagcgccggtctgaaagaaagaaatctgccagtacatccaccaagaacaagcgcaagtcgtctagcttgagggatggcaacacaactggcagggctcttgatttcggctgtgcagattcttcaaggcatccattgtccccattgccccacaactccccagactacagggcgcacaagaagtgaacccagctttcttgtacaaagttggcattataagaaagcattgcttatca

SEQ ID NO: 590 - protein, 95 aa, Zea mays
MNLDTAEAEVVTLSEDNRALDEEIKRLLSLLEKERQRRSERKKSASTSTKNKRKSSSLRDGNTTGRALDFGCADSSRHPLSPLPHNSPDYRAHKK

SEQ ID NO: 591 - DNA, 1041 bp, Zea mays
ctgttcgttgcaacaaattgatgagcaatgcttttttataatgccaactttgtacaaaaaagcaggcttaaacaatggatctcgacatcactgatgcagagacaaaaaggtctaatgcggtctggaaaaatcttgagctcgcaaccatgaaattgtcccaagaactggcagagcaattgcgcctggttatggaaccaactcttgctagtaagcttcaaggggattatagaactggaaagagaataaacatgaagaaggttattccatatattgcgagtcatttccgcagggacaagatatggttgcgccgaactaagcctaataaacggaattaccaagtggttattgctgttgatgactctagaagtatgtctgagggcaagtgtggaaaatttgctatcgaggcattagttactgtgtgccgtgctatgtcacagcttgaggttggacaatttgcagttgcaagttttgggaagaaggggaacgttagtgtgctacacgattttgatcagatctttaatggtgaagctggagttaatgtgatctctagcttgtcgtttgagcaagataacaaaattgaggatgaaccggtgtctgatctcttgacacatctgaatgttatgcttgatactgccgttgcacgggcacgcaccccatcagggcaaaatcctctccagcaactgatactgataatatctgatggaaaattccatgaaaaggaaaacttgaggcgccatgttagagacgttctaaatcgaaagaggatggtcgcgtatgtgctcctggatagccccgaggattctattattaatctaaaggaagcatgcttcagagtaggggagaaggtagagctgaaaaaatacatggattcctttccgttcccgtattatgttatgctacagaacattgaagctcttcctcgcacattggccgacctgcttagacagtggtttgagctcatgcagagcgccaacgagtgaacccagctttcttgtacaaagttggcattataagaaagcattgcttatcaatttgttgcaa

SEQ ID NO: 592 - protein, 301 aa, Zea mays
MDLDITDAETKRSNAVWKNLELATMKLSQELAEQLRLVMEPTLASKLQGDYRTGKRINMKKVIPYIASHFRRDKIWLRRTKPNKRNYQVVIAVDDSRSMSEGKCGKFAIEALVTVCRAMSQLEVGQFAVASFGKKGNVSVLHDFDQIFNGEAGVNVISSLSFEQDNKIEDEPVSDLLTHLNVMLDTAVARARTPSGQNPLQQLILIISDGKFHEKENLRRHVRDVLNRKRMVAYVLLDSPEDSIINLKEACFRVGEKVELKKYMDSFPFPYYVMLQNIEALPRTLADLLRQWFELMQSANE

SEQ ID NO: 593 - DNA, 2611 bp, Zea mays
tttgatcgagaggacggccagccagccagccttaaaccctacccgcccaaacccacacgactcacgaccatggccgccgccgccgccgctaaggcagcggccgcggccgtctccgcgggggccgcctttgtgctctcctccgagcgggcccacgccgacgggggcggctccaccttccgcttccccggcttctactcctccgccccctccccggccccggccccggcccctgcccccgccgcgccgccgcctcaggagtccaatgccccggaggaggcgccgaaggtttcgactcagcaccctcgcactagtgcggcgggcttcgatcccgcgccgctggagcgtggggtggaggcgattaacaagctcaagcaggcgtcggaccccaaaaagctgttcgagtttatgaagaagcaggaggagactcaccagcaggaaatagctgcgaagaaactcgagttgcagaaggcactggccgagatcgagcttgagcaaaaacgggtggattttgaagaaaggaaaaaacttgatcaacaacgagctaaaattaagtcgcagatggctcaatacgaggatgagctaaaaaggaagcgactgcaggctgaacatgaggcgcagaggttaaggaaccaggagcttgtgaagatgcaagaggaatctgggattaggctagagcagatcaggcgggcgactgaggagcaaatccaggaacaacggagacagacagagagacatagggctgatctagagcaggcgaccatttcaaagaaagccatggcagaggcggaggggagaatactagtaacaaggcaaactgaagatgtgaagagacgattgattttggaggagataaatgctgacagagagaagtggatccaagtgataaatacaacatttgagcatataggaggtggtttgcgaacgatattaaccgaccaaaataagctagtggtagcagttggaggggtaacagcacttgctgcagggatatacacaacaagggagggtgcaagagtagtctggggctatgttgatcgtatcctgggtcagccatcactgataagggagtcatcacgtgggaaatatccctggtctggtttcctctcacgtgctacaagtaccctgactagcaaactgaagaatggaagcaacctagggaaggacagaaatgggtttggtgatgttattctaaatccttctctccagaagagagtgaagcagcttgctaatgccacggccaatacaaaacttcatcaagctcctttcaggaacatgcttttctatgggcctcctggcacagggaaaaccatggcagcacgagaacttgctcgcaattctggattagattatgcactaatgactggtggagatgttgcaccattgggatcacaagcagtcaccaagattcatcagttgtttgactgggcgaagaaatctaacaggggtttgcttctcttcatagatgaagcagatgctttcttgtgcgaacggaacaaaacttacatgagtgaagctcaaaggagtgccctgaatgctctcctcttccgcacaggtgaccaatccaaggacattgtccttgcacttgccaccaacagacccggtgatcttgactctgctgttgctgaccgtattgatgaggtcctggaatttcccctgcctggggaagatgagcgattcaagctcctgaagctatatctggacaagtacataatcaaagctggtgacaaacatgagaagagctggctccagttcttccgtcgccagccccagaagattgaggtgaaaggcatcactgatgacctgatccgggaggcggcatccaggacccagggcttctctggaagagagatagcgaagatgatggcaagcgtccaggccgctgtctatgggagcaaggactgcgagctcaccccaggcctgttccgtgaggttgtggactacaaggtcgctgagcacaagcagcggagaagattagccggtgaggagccaaagcaggatgcctagtttaccaatttttttgattcacccccattttgccgtgggatgtactgtgtttcccccccgggatagattgcttcatcgggcaggcgttttgcatgccccgtgttattcttttgttccatttgccttaccaggttggtctaaggtggtaggcgatggtaacttttttggtataagagatgagggttgcatgtggcatgtgatggaaactttggcgacaggtcacacacacacccagcaagctggccccgttttgatgcattatactgtttggtcagtcttctatcttcttactgatgctcgtcataaaatagtctgatttactgacaataatcgacagtgagccagtggctataatggtgttggcattgttttgcagctcttgtagatgtgtcgtacctactgatgctcgtcacaataagttagaacctttaaataattttagttaaaaaaacaaatataaatagagtccgatcctaatctaatttgatctttataaagtttatagtgtaaaattaaaatctagagtctatagtaccgctctgcccgtgaatgaattgagcagttccattcacccatcttcgctggtgcgcgacaatgtcctgcgccg

SEQ ID NO: 594 - protein, 644 aa, Zea mays
MAAAAAAKAAAAAVSAGAAFVLSSERAHADGGGSTFRFPGFYSSAPSPAPAPAPAPAAPPPQESNAPEEAPKVSTQHPRTSAAGFDPAPLERGVEAINKLKQASDPKKLFEFMKKQEETHQQEIAAKKLELQKALAEIELEQKRVDFEERKKLDQQRAKIKSQMAQYEDELKRKRLQAEHEAQRLRNQELVKMQEESGIRLEQIRRATEEQIQEQRRQTERHRADLEQATISKKAMAEAEGRILVTRQTEDVKRRLILEEINADREKWIQVINTTFEHIGGGLRTILTDQNKLVVAVGGVTALAAGIYTTREGARVVWGYVDRILGQPSLIRESSRGKYPWSGFLSRATSTLTSKLKNGSNLGKDRNGFGDVILNPSLQKRVKQLANATANTKLHQAPFRNMLFYGPPGTGKTMAARELARNSGLDYALMTGGDVAPLGSQAVTKIHQLFDWAKKSNRGLLLFIDEADAFLCERNKTYMSEAQRSALNALLFRTGDQSKDIVLALATNRPGDLDSAVADRIDEVLEFPLPGEDERFKLLKLYLDKYIIKAGDKHEKSWLQFFRRQPQKIEVKGITDDLIREAASRTQGFSGREIAKMMASVQAAVYGSKDCELTPGLFREVVDYKVAEHKQRRRLAGEEPKQDA

SEQ ID NO: 595 - DNA, 1700 bp, Zea mays
tgatagtgacctgttcgttgcaacaaattgatgagcaatgcttttttataatgccaactttgtacaaaaaagcaggcttaaacaatgaagcttgacgtgaatgcccttcgctacctcgccaaggacgacttccgtgtcctcaccgccgtcgagatgggcatgcgcaaccatgagattgttccagtagaacttattgacaggattgccagattgaagcatggaggcacatacaaagtgctgaggaatcttttgaggaacaagctggtgcatcatggtgccactaaatacgatggatatcggctcacctatctgggatatgacttccttgccatcaagactttggttaatcgaggagtttttgcttcagttggccgccagattggtgttggaaaggagtcagatatatttgaggtagccacagacgatggtacagtacttgccatgaagcttcataggttgggcaggacatcttttagagctgtgaaatctaagcgtgactatctaaggcaccgaaggagctttaattggctgtatctctcacgactcgcagccgtgaaggaatttgcctttatgaaggctttaggagatcatggtttccctgttccaactgctgtggattgcaaccggcattgtgtgatcatgtcacttgtgcagggatatcctcttgttcaagtgaaaaagttacaaaatccggatgatgtttttgactcaattcttggtcttatcgttcgtttggctgagcatggactcatacactgtgactttaatgagttcaatatcatgattgacgatgatgaaaaaattacagtgattgactttccgcagatggtgtctgtttctcaccgtaatgcccaaatgttttttgaccgagacattgaatgcatctacaagttctttaacaaaaggttcaatctgaggtcagtgaaaaatgaagaacaagctggatctgaaaatgatgatgaagggaacagcagaccttcctttttgtccgtggaaaagggtgctggttccttggacaaggaactagctgccagtggatttaccaggaaagagaaagtggatatggataagtacatcgaggaagttgttgaagggcatgattccagctcagatgatgataatgatgaggacagttccgatgagcctgattgtgatcttaccccaagtgattcagacgcgcctggaactttttctgaagagcatggaacaagttgtagcggcgagaacagattggaaattcctccctcggatggcaatggagtggttatggcaccgctcgaatctgggatcaagacgttttccatggaagatgatgataacgatgatggctcgtcagaggatgctgatgaagaagaagatgctgagctcacgaaacaattgaacaagcaaaggagaaaagcaatcgcagctgcccatgggcggagaagaccaacgtcatccaggaacgcctacaaggacaagggtaagggcaccatgaactccaagatgcagaggcaggcgtgcaactggtgatggttgagtgcctcttgcggcaaatagattacccagctttcttgtacaaagttggcattataagaaagcattgcttatcaatttgttgcaacgaacaggtcactatcagtcaaaataaaatcattatttgccatccagctgatatcccctatagtgagtcgtattacatggtcatagctgtttcctgg

SEQ ID NO: 596 - protein, 475 aa, Zea mays
MKLDVNALRYLAKDDFRVLTAVEMGMRNHEIVPVELIDRIARLKHGGTYKVLRNLLRNKLVHHGATKYDGYRLTYLGYDFLAIKTLVNRGVFASVGRQIGVGKESDIFEVATDDGTVLAMKLHRLGRTSFRAVKSKRDYLRHRRSFNWLYLSRLAAVKEFAFMKALGDHGFPVPTAVDCNRHCVIMSLVQGYPLVQVKKLQNPDDVFDSILGLIVRLAEHGLIHCDFNEFNIMIDDDEKITVIDFPQMVSVSHRNAQMFFDRDIECIYKFFNKRFNLRSVKNEEQAGSENDDEGNSRPSFLSVEKGAGSLDKELAASGFTRKEKVDMDKYIEEVVEGHDSSSDDDNDEDSSDEPDCDLTPSDSDAPGTFSEEHGTSCSGENRLEIPPSDGNGVVMAPLESGIKTFSMEDDDNDDGSSEDADEEEDAELTKQLNKQRRKAIAAAHGRRRPTSSRNAYKDKGKGTMNSKMQRQACNW

SEQ ID NO: 597 - DNA, 2311 bp, Zea mays
aaataatgattttattttgactgatagtgacctgttcgttgcaacaaattgatgagcaatgcttttttataatgccaactttgtacaaaaaagcaggcttaaacaatgatcacatttgcggacctgacggagccggccgccgccggcgccgagcggtgcgtggaccggcaactgtggctggcgtgcgcgggcagcatgtgcaccgtgccgcttgttggcgccagcgtctgctacttcccgcaggggcacgcggagcacgcgctcggtctcgacggtgcggccgacctctccgcggcgcgcgtaccggcgctggtcccctgccgcgtcacggcagtgcgctacatggctgatccagacaccgacgaggtcttcgccaggatccgcctcgtcccgctacgcggcggggaggcgcacgcgggtggcctcgatgacgatgtggccgcggcggacgagcaggagaagccggcgtcgttcgccaagacgctgacacagtccgacgccaacaacggcggcgggttctccgtgccgaggtactgcgcggagaccatcttcccgcggcttgactacgccgccgacccgcccgtgcagaacgtcgtcgccaaggatgtgcacgggaccgcctggaagttccgccacatctaccggggcacgccgcgccggcacctgctcaccactgggtggagcacgtttgtcaaccagaagaagctcatcgccggggactccatcgtgttcctccgcggtgacagcggggacctgcacgtcggcatccggcgcgcaaagcgtgggttctgcggcgctggtgggggcggaggcgacgaggcccctacgcccgggtggcatcattacgccggccttatccgaggtaatgtgagcccttgcgcggctgccaaggcacggggcaaggtgcgaccagaggacgtggccgaggcggcgaggctggcggctgccgggcagtcgtttgaggtggtgtactaccctcgcgcgagcacgcccgagttctgcgttcgcgccgccgcggtccgcgcggcgatgagggtgcagtggtccccagggatgcggttcaagatggcgttcgagaccgaggactcctccaggatcagctggttcatgggcaccgtcgccggcgtccaggtcaccgaccccatccgctggccgcagtcgccgtggcgccttcttcaggtgacctgggacgagccggaccttctgcagaacgtgaagcgggtgagcccatggctggtcgagctggtgtcaagcatgccggccatccacctcgcctccttctcgccgccgcggaagaagccccgcatcccagcgtaccccgagttccccttcgaagggcagctccttaacccggcgttcccgcccagcccactgccacacggccagcaacaccaccacaatttccttcacgcccacccaccgtcgttcttcccgttcccggacggcagtgctcctgcagccatacagggagccaggcatgcgcaatttgttccatctttatcagatctccaccttatccacctgcagtcgagcctgctgtaccctgggctccgccgtcccgaccatgtcggtccgacgatccctatcccgtcgggaatcagcaccgacctgaccatcggaggcgcaccggcgcgcgacggcgtcccgtgtgccctgtccgtcggtgccagcaagcagaaccccgacgccgtcaagccggcggggctggtgctcttcggacggaccatactaaccgagcatcagatgagcctcagcagctccggcggcgccacctccccagcggcgactggtaacagctctctgtgctggaccgccgagaagggccccaatgtctcggagggctcgggctcgggctcgggctccggcgtcatccagaacagcccgaccggcaagaacacgtcgtcggagaggctgccgtggttcggggacggcagcagccagcaggcctccgagcccggtcttgagcccggacaatgcaaggtgttcgtcgagtccgacacggtcggccgcaacctcgacctgtcggcgctgggctcgttcgacgagctgtacggccgcctgtccgagatgttcggcgtcgagggcgcggagatgcggagccgcgtgctgtaccgcggcgccaccggtgaagtgaggcacgccggcgacgagcccttcaggtaaacccagctttcttgtacaaagttggcattataagaaagcattgcttatcaatttgttgcaacgaacaggtcactatcagtcaaaataaaatcattatttgccatccagctgatatcccctatagtgagtcgtattacatggtcatagc

SEQ ID NO: 598 - protein, 685 aa, Zea mays
MITFADLTEPAAAGAERCVDRQLWLACAGSMCTVPLVGASVCYFPQGHAEHALGLDGAADLSAARVPALVPCRVTAVRYMADPDTDEVFARIRLVPLRGGEAHAGGLDDDVAAADEQEKPASFAKTLTQSDANNGGGFSVPRYCAETIFPRLDYAADPPVQNVVAKDVHGTAWKFRHIYRGTPRRHLLTTGWSTFVNQKKLIAGDSIVFLRGDSGDLHVGIRRAKRGFCGAGGGGGDEAPTPGWHHYAGLIRGNVSPCAAAKARGKVRPEDVAEAARLAAAGQSFEVVYYPRASTPEFCVRAAAVRAAMRVQWSPGMRFKMAFETEDSSRISWFMGTVAGVQVTDPIRWPQSPWRLLQVTWDEPDLLQNVKRVSPWLVELVSSMPAIHLASFSPPRKKPRIPAYPEFPFEGQLLNPAFPPSPLPHGQQHHHNFLHAHPPSFFPFPDGSAPAAIQGARHAQFVPSLSDLHLIHLQSSLLYPGLRRPDHVGPTIPIPSGISTDLTIGGAPARDGVPCALSVGASKQNPDAVKPAGLVLFGRTILTEHQMSLSSSGGATSPAATGNSSLCWTAEKGPNVSEGSGSGSGSGVIQNSPTGKNTSSERLPWFGDGSSQQASEPGLEPGQCKVFVESDTVGRNLDLSALGSFDELYGRLSEMFGVEGAEMRSRVLYRGATGEVRHAGDEPFR

SEQ ID NO: 599 - DNA, 1524 bp, Zea mays
tttgtacaaaaaagcaggcttaaacaatggctatgcgaaaagaaaaccctgtgcttaatgcttgtcaagcatccaatggccggatcacgcgagctcaagctgctgcaaatcgtcgaagctttggaactttcccttctgttccattgcctgcaaaaaccgaacgaaaacagactgcacaagggaaggcaaaacgaggttcttcatatgacaacaccagtgcaagtgttgcactttcaggcccccagcctaaaaggcgcacagtactcagggatgtgaccaatttgagcaatgctaactctaacaaaagttttgctgctgcaccgaagcttcagacaaagccctctctaaggactggaagaaccgtgagcaaaagcaagccgtgcgcaaaaaagattcctaaaaaaccaccaccagctggtaatggaagtgcattgactaatgttttgaacattgctgaagaaacacaagcggagaagattttggcagagagagtggaacccgttctgttgcttgagaacagggggccactttcattgcagaatgttgaaaggaacagggacagtgcttgtcatgaggtattctttgaggaaagaaacctcagggataaatgtgaaccttctgtgccaaagaatggggactcttatgtgttagacattgtagatatcgacaaagataatggcaatcctcaaatgtgtgcttcctacgttgtggagatatactcaaacctaatggcttcagagcttatgagaagaccaagtccaaattacatggagggtttgcaacgggacatcacaaagggcatgagagaaatactcattgattggcttgtggaggtttctgaagaatacaagcttgttccagacacgctgtacctaactgtatatcttattgaccggtttctttctcggaactacattgaaagacagagactacaacttgtgggaataacaagcatgcttgttgcctcgaaatatgaagagatatgtgctcctcgagtagaagagttctgtttcataaccgacaatacatacacaaaagcagaggtgctgaaaatggagagccagctgctgaatgacctgggatttaacctttctgttccaactacaaaaacatttctcaggagattccttagagcggcacaagcatctcgtaaaactccttctatgactttaggatttctggccaattatctcgcggagttgactttgaccgaatatgagttcttgaaatttcttccgtcgttggtggcagcatcggccgtgtttcttgctagatggacgcttgaccaatccgacctcccatggaaccagactctagagcactacacctcttacaaatgctctgacattcaattgtgtgtctgtgctctacgggaactccagcataacaccagtaactgccctcttaacgccatccgcgagaagtacaggcatcaaaagtttgaatgcgtagcgaacctaacttcaccggagttccctcggtcgttcttcagctgacacgccaacccagctttcttgtacaaag

SEQ ID NO: 600 - protein, 489 aa, Zea mays
MAMRKENPVLNACQASNGRITRAQAAANRRSFGTFPSVPLPAKTERKQTAQGKAKRGSSYDNTSASVALSGPQPKRRTVLRDVTNLSNANSNKSFAAAPKLQTKPSLRTGRTVSKSKPCAKKIPKKPPPAGNGSALTNVLNIAEETQAEKILAERVEPVLLLENRGPLSLQNVERNRDSACHEVFFEERNLRDKCEPSVPKNGDSYVLDIVDIDKDNGNPQMCASYVVEIYSNLMASELMRRPSPNYMEGLQRDITKGMREILIDWLVEVSEEYKLVPDTLYLTVYLIDRFLSRNYIERQRLQLVGITSMLVASKYEEICAPRVEEFCFITDNTYTKAEVLKMESQLLNDLGFNLSVPTTKTFLRRFLRAAQASRKTPSMTLGFLANYLAELTLTEYEFLKFLPSLVAASAVFLARWTLDQSDLPWNQTLEHYTSYKCSDIQLCVCALRELQHNTSNCPLNAIREKYRHQKFECVANLTSPEFPRSFFS

SEQ ID NO: 601 - DNA, 978 bp, Zea mays
attgatgagcaatgcttttttataatgccaactttgtacaaaaaagcaggcttaaacaatggcggggctctacgagaagcagtcggagacgtacgccaagaagcgtccgcagtaccccaaggagtggttctccatgctggccagcctcaccgcggggcaccagcgcgcctgggacgccgggtgtggcaccggccaggccgccatcagcatggcggagcactacgagagcgtggtggcgacggacgtgagcaaggggcagctccggcacgccaccgcgcacccgaaggtgcggtacctccacaccccggagcacctctcggaggacgagctggtgtcgctggtcggcggcgagggctccctggacctggtcgtggtggccacctccatccactggttcgacgtcccgctcttctacgccgtcgtgagccgcgccctgcggaagcccggcggcatgctcgccgtgtggggctacaactacgagatccacccgttcgaggacgcgctgcacggccagctctacccggccctgcggccgtacctggacccgcgggcgggactggccatggagcggtacaggtccctgccgttcccgttcgagcccgtcggggtgggcgccgagggcgcgcccgccgacgtggacatcgaggtggagatgacgctggaggacctggtcgggttcctgaacaccggctctgtcgtgaccacggcgagggccaagggcgtggacctggaggcggtcacgagggccgcgctgaagcgtgtggaggagcagtggggcggcgcgcccaccgtgccgaggaagctcgtgttcaaggcgttcatgctcgccgggaggcccaagtgctgaagtgataagccgaataagtacccagctttcttgtacaaagttggcattataagaaagcattgcttatcaatttgttgcaacgaacaggtcactatcagtcaaaataaaatcattatttgccatccagctga

SEQ ID NO: 602 - protein, 275 aa, Zea mays
MPTLYKKAGLNNGGALREAVGDVRQEASAVPQGVVLHAGQPHRGAPARLGRRVWHRPGRHQHGGALRERGGDGREQGAAPARHRAPEGAVPPHPGAPLGGRAGVAGRRRGLPGPGRGGHLHPLVRRPALLRRREPRPAEARRHARRVGLQLRDPPVRGRAARPALPGPAAVPGPAGGTGHGAVQVPAVPVRARRGGRRGRARRRGHRGGDDAGGPGRVPEHRLCRDHGEGQGRGPGGGHEGRAEACGGAVGRRAHRAEEARVQGVHARREAQVLK

SEQ ID NO: 603 - DNA, 3132 bp, Zea mays
aaataatgattttattttgactgatagtgacctgttcgttgcaacaaattgatgagcaatgcttttttataatgccaactttgtacaaaaaagcaggcttaaacaatggggggcaacaagtactgcgcggcgatgacgaagaggagatggagggggctggcagcggccgcgtgggtgctagtcgcggtggcttgctccgcggtgatgcactggaccatgcgccgggagagcatggaccgcgccgaggagcgcctcgtcagcatgtgcgaggagagggccaggatgctgcaggagcagttcggggtcaccgtcaaccacgtccacgcgatcgccattctcatcgccaccttcaactacgataagtccccttccgctatcgaccaggacacttttgcaaaatacacggcaaggacatcatttgagcgaccgctactcaatggggtggcatatgcacagcgtgtattccatcatgagagggaaatgtttgaaagccagcagggatggattatgaatacaatgcagcgggagcctgcacccccgcaggttgaatatgctccagtgattttctctcaggatactgtttcctacctcgcacgcattgacatgatgtctggagaggaggaccgagaaaacattttgcgggccaggactactggcaaagctgtgttaacaaacccatttcggttgcttggatcaaaccacttgggagtagttctcacttttgctgtgtaccgccctgatctccccgctgatgcatcagttgagcaacgtgtggaagcaactattggatatcttggtggagcgtttgatgtggagtcacttgtggagaatttgctgagcaaacttgctggcaatcaggatattgtggtgaatgtctatgatgtcacaaatgcttcagaggctatggttttgtatggaccttctagttcggatgagcgcgtgcctttcttgcatgttagcatgttggattttggagatccgtttaggaggcatgaaatgaggtgcaggtatagacaaaagcttcctatgcagtggtctgccataaccaatcctttgggcacatttgtcatatggatgcttctggggtatagcattgccgctgcatattctcgatatgacaaagttacagaagattgtagaaagatggaagagctaaaaacgcaggcagaagctgctgatgttgcaaagtctcagttcctggcaactgtgtcacatgagatcagaacacctatgaatggcgtccttggaatgctggatatgcttttaggaacagatctaactatgacacagaaggattatgctcaaactgctcaaatgtgtggcagagcattgataacgttgataaatgatgtccttgatcgagcaaagattgaagctggaaagttagagcttgaagcggtgccttttgacctgcgttctctcatggatgatgttatttccttattttcttcaaagtcacgggagaagtgcattgagcttgcagtatttgtatgtgacaatgttccgaaggatgttcttggagatccttggaggtttcggcagatactaacaaatttggtcggcaatgcagtcaaattcacagaacggggtcatgtatttgtgcgggtctgtttggctgataactcaaatatggaagccggtcaggtcctaaatggagccatgaatgggaaagatggtagagttgattcaacaactaatggtgccttcaatactctgagtgggtttgaagcagcagacagacgaaatagttggcaatattttaagatgctcctctctgataaggagtcccttttggatgatcttgagggaacaaattctgatcaaagtgattcagaccatgtcacactagcgataagtattgaggacacaggtgttgggataccattgcaagcacaagatcgtgtttttacaccgtttatgcaggctgatagttcaacttcaaggaattatggtggtactggcatcggtttaagcattagcaagtgcctagctgaacttatgggtgggcagataagttttgtcagccgtccttttgttggaagtacattcactttctccaccacactgaagcgctcatacaaagatatttcagttgattcaagtaggagcttgttagaggcactaccaactgcttttaagggaatgaaggccatcttgatagatgggagacctgtacgtagtgctgttacaagatatcacctcaagaggttgggaataattgttcaagttgtgaacaatatgagtgcagtagtaaaagctttccctggacaaaatggagcaactgtttctagggaaaaggcaaccattctttttattgagagtgacttttggaggcccgagacagatgttcagttattgaaccatctacgcgagcacaagaatcgtcagttgtctgatgggcataaggtagttcttttggtcacctccgaagctgataaggacaagtatggatccatatttgatattgtgatgtgcaagcctataagggcaagcatgattgcttcatctattcaacaactgctcaaagtagagatgcctgaaagaagaaataatcataatcggccatcatttcttcgcagcctgctggttgggaagaatatattggtagtagatgataataaagtcaatcttagagtcgctgcagctgcactcaaaaagtacggtgctaatgttagctgtgttgagagtggcaaagatgctatcagtctacttcaacccccacattgctttgacgcatgttttatggatgttcagatgccagagatggatgggtttgaggcaacaagacaaataaggcaaacagagatgagagttaacgaggaaaggaagaataagttggtgttgattgaaggctcaacatttgttgagtaccatttgcctgttttggcgatgacagccgatgttatccaggcaacttacgagaagtgtataaaatcgggaatggatggatacgtgtctaaacccttcgacgaggagcagctataccaagcagtctccagattaatagtgggaacgacagattcgactgtttaaacccagctttcttgtacaaagttggcattataagaaagcattgcttatcaatttgttgcaacgaacaggtcactatcagtcaaaataaaatcattattt

SEQ ID NO: 604 - protein, 975 aa, Zea mays
MGGNKYCAAMTKRRWRGLAAAAWVLVAVACSAVMHWTMRRESMDRAEERLVSMCEERARMLQEQFGVTVNHVHAIAILIATFNYDKSPSAIDQDTFAKYTARTSFERPLLNGVAYAQRVFHHEREMFESQQGWIMNTMQREPAPPQVEYAPVIFSQDTVSYLARIDMMSGEEDRENILRARTTGKAVLTNPFRLLGSNHLGVVLTFAVYRPDLPADASVEQRVEATIGYLGGAFDVESLVENLLSKLAGNQDIVVNVYDVTNASEAMVLYGPSSSDERVPFLHVSMLDFGDPFRRHEMRCRYRQKLPMQWSAITNPLGTFVIWMLLGYSIAAAYSRYDKVTEDCRKMEELKTQAEAADVAKSQFLATVSHEIRTPMNGVLGMLDMLLGTDLTMTQKDYAQTAQMCGRALITLINDVLDRAKIEAGKLELEAVPFDLRSLMDDVISLFSSKSREKCIELAVFVCDNVPKDVLGDPWRFRQILTNLVGNAVKFTERGHVFVRVCLADNSNMEAGQVLNGAMNGKDGRVDSTTNGAFNTLSGFEAADRRNSWQYFKMLLSDKESLLDDLEGTNSDQSDSDHVTLAISIEDTGVGIPLQAQDRVFTPFMQADSSTSRNYGGTGIGLSISKCLAELMGGQISFVSRPFVGSTFTFSTTLKRSYKDISVDSSRSLLEALPTAFKGMKAILIDGRPVRSAVTRYHLKRLGIIVQVVNNMSAVVKAFPGQNGATVSREKATILFIESDFWRPETDVQLLNHLREHKNRQLSDGHKVVLLVTSEADKDKYGSIFDIVMCKPIRASMIASSIQQLLKVEMPERRNNHNRPSFLRSLLVGKNILVVDDNKVNLRVAAAALKKYGANVSCVESGKDAISLLQPPHCFDACFMDVQMPEMDGFEATRQIRQTEMRVNEERKNKLVLIEGSTFVEYHLPVLAMTADVIQATYEKCIKSGMDGYVSKPFDEEQLYQAVSRLIVGTTDSTV

SEQ ID NO: 605 - DNA, 2012 bp, Zea mays
tcgttgcacaattgatgagcaatgcttttttataatgccaactttgtacaaaaaagcaggcttaaacaatggcggtgatggccgaagtagtgtcgaccaccggcgcggcgctccggagcccggcctcgcagcagccggcggcggcgggcgcggcgaagggcaccgacgctgagaagctccagttcatcgaggacatgacctccaacgtggacgccgtgcaggagcgcgtgctgggggagatcctcgcccgcaacgcggacaccgagtacctcgccggcaggtgcggcctcgccggcgctacggaccgcgccaccttccgcgccaaggtgccgatggcgacgtacgaggacctgcagccgtacatccggcgcatcgccgacggcgaccgctcgcccatcctgtcggggcacccggtctccgagttcctcaccagctccggcacgtccggcggcgagcgcaagctcatgcccaccatcgaggacgagctcaaccgccgccagctgctgtacagcctccagatgcccgtcatgaacctgtacgtgcctgggatggacaaggggaaagctctccatttcctgttcgtcaagtcggagaccaagacaccgggcggcctcgcggcgaggcccgtcctcacgagctactacaagagcaaccacttcaggaaccgcccgttcgacgcgtacaacaactacacgagccccacggcggccatcctctgcgcggacgcgttccagagcatgtacgcgcagatggtgtgcgggctgtgccagcgccaggacgtgctgcgcgtgggcgccgtgttcgcgtcgggcctcctccgcgccatccgcttcctccagctcaactgggagcagctggcggacgacatcgaggccggctcgctgaccccgcgcgtcaccgacccgtcggtgcgcgaggcggtcgccggcatcctccgccctgaccccgcggtcgccgagctggtccgctccgagtgctccgggggcgactgggcgggcatcgtcacccgcatttggcccaacaccaagtacctggacgtgatcgtcaccggcgccatggcgcagtacatcccgacgctcaagcactacagcggcgggctcccgatggcgtgcaccatgtacgcgtcctcggagtgctacttcgggctgaacctccggcccatgtgcgacccgtcggaggtgtcctacaccctgatgcccaacatgtgctacttcgagttcctgccgatgggcggcgccgtcgacgcgagccagctggtggacctcgcccgcgtggagcgcgggcgcgagtacgagctggtgatcaccacgtacgcggggctgaaccggtaccgcgtcggcgacgtgctccaggtgaccggcttccacaactcggcgccgcagttccggttcgtgcgccgcaagaacgtgctgctgtccatcgagtcggacaagacggacgaggccgagctgcagcgcgccgtggagcgcgcgtccgcgctgctccgcccgcacggcgccgccgtggtggagtacaccagccaggcctacaccaagagcatcccgggccactacgtcgtctactgggagctcctgcaggccaaggggggcgccgcggtggacggggagacgctggaagggtgctgcctcgagatggaggaggcgctgaacgcggtgtacaggcagagccgcgtggccgacggctccatcggcccgctggagatccgggtggtccggccgggcaccttcgaggagctcatggactacgccatctcccgcggcgcgtccatcaaccagtacaaggtgccccggtgcgtgacgttcccgcccatcatcgagctcctggactcccgcgtcgtgtccagccacttgagccccgcgctgccgcactggaccgccggccagcgctccgactccgactaacccagctttcttgtacaaagttggcattataagaaagcattgcttatcaatttgttgcaacgaacaggtcactatcagtcaaaataaaatcattatttgccatccagctga

SEQ ID NO: 606 - protein, 610 aa, Zea mays
MAVMAEVVSTTGAALRSPASQQPAAAGAAKGTDAEKLQFIEDMTSNVDAVQERVLGEILARNADTEYLAGRCGLAGATDRATFRAKVPMATYEDLQPYIRRIADGDRSPILSGHPVSEFLTSSGTSGGERKLMPTIEDELNRRQLLYSLQMPVMNLYVPGMDKGKALHFLFVKSETKTPGGLAARPVLTSYYKSNHFRNRPFDAYNNYTSPTAAILCADAFQSMYAQMVCGLCQRQDVLRVGAVFASGLLRAIRFLQLNWEQLADDIEAGSLTPRVTDPSVREAVAGILRPDPAVAELVRSECSGGDWAGIVTRIWPNTKYLDVIVTGAMAQYIPTLKHYSGGLPMACTMYASSECYFGLNLRPMCDPSEVSYTLMPNMCYFEFLPMGGAVDASQLVDLARVERGREYELVITTYAGLNRYRVGDVLQVTGFHNSAPQFRFVRRKNVLLSIESDKTDEAELQRAVERASALLRPHGAAVVEYTSQAYTKSIPGHYVVYWELLQAKGGAAVDGETLEGCCLEMEEALNAVYRQSRVADGSIGPLEIRVVRPGTFEELMDYAISRGASINQYKVPRCVTFPPIIELLDSRVVSSHLSPALPHWTAGQRSDSD

SEQ ID NO: 607 - DNA, 2084 bp, Zea mays
aaataatgattttattttgactgatagtgacctgttcgttgcaacaaattgatgagcaatgcttttttataatgccaactttgtacaaaaaagcaggcttaaacaatggcggtgatggccgaagtagtgtcgaccaccggcgcggcgctccggagcccggcctcgcagccgctgccggccgcggtgaagaacgcagacgctgagaagctccagttcatcgaggagatgacctccaacgtggacgccgtgcaggagcgcgtgctgggggagatcctcgcccgcaacgccggcaccgagtacctcgccaagtacggcctcgccgccgctactacggaccgcgccaccttccgcgccaaggtgccgatggcgacgtacgaggacctgcagccgtacatccgccgcattgccgacggcgaccgctcgcccatcctgtcggggcacccggtgtccgagttcctcaccagctccggcacgtccgccggcgagcgcaagctcatgcccaccatcgaggacgagctcaaccgccgccagctgctgtacagcctccagatgcccgtaatgaacctgtacgtgcccgggatggacaaggggaaggctctccatttcctctttgtcaagtcggagacgaagacgccgggcggcctcgcggcgaggcccgtcctgacgagctactacaagagcaaccacttcaagaaccgcccgttcgacgcctacaacaactacacgagccccacggcggccatcctctgcgccgacgcgttccagagcatgtacgcgcagatgctgtgcgggctgtgccagcgccaggacgtgctgcgcgtcggcgcggtgttcgcgtcgggcctcctccgcgccattcgcttcctccagctcaactgggagcagctcgcggaggacatcgaagccggctcgctcaccccgcgcgtcaccgacccgtcggtgcgcgaggcggtcgccggcatcctccgcgctgaccccgagctcgcggcgctggtccgctccgagtgctccaagggcgactgggctggcatcatcacccgcatttggcccagcaccaagtacctggacgtcatcgtcaccggcgccatggcgcagtacatcccgacgctcaagtactacagcggcgggctcccgatggcgtgcaccatgtacgcgtcctccgagtgctacttcgggctgaacctccgccccatgtgcgacccctcggaggtgtcctacaccctgatgcccaacatgtgctacttcgagttcctgccgatggactccgcggcggcgtccggcggcgacgcgagccagctggtggacctcgcccgcgtggaggtcgggcgcgagtacgagctggtgatcaccacgtacgcggggctgaaccggtaccgcgtcggcgacgtgctccaggtgaccggcttccacaactccgcgccgcagttccggttcgtgcggcgcaagaacgtgctgctgtccatcgagtccgacaagacggacgaggccgagctgcagcgcgccgtggagcgcgcgtccgcgctgctccgcccgcacggcgccgccgtggtggagtacaccagccaggcctacaccaagagcatcccgggccactacgtcatctactgggagctcctggccaagggccccgcgggcggcgccgcggtgggcgaggggacgctggagaggtgctgcctggagatggaggaggcgctgaacacggtgtacaggcagagccgcgtggcggacgggtccatcgggccgctggagatccgggtggtccggccgggcaccttcgaggagctcatggactacgccatctcccgcggcgcgtccatcaaccagtacaaggtgccccggtgcgtgacgttcccgcccatcatcgagctcctggactcccgcgtcgtgtccagccacttcagccccgcgctgccgcactggacccccggccagcgctccgactccgactagacccagctttcttgtacaaagttggcattataagaaagcattgcttatcaatttgttgcaacgaacaggtcactatcagtcaaaataaaatcattatttgccatccagctgatatcccctatagtgagtcgtat

SEQ ID NO: 608 - protein, 614 aa, Zea mays
MAVMAEVVSTTGAALRSPASQPLPAAVKNADAEKLQFIEEMTSNVDAVQERVLGEILARNAGTEYLAKYGLAAATTDRATFRAKVPMATYEDLQPYIRRIADGDRSPILSGHPVSEFLTSSGTSAGERKLMPTIEDELNRRQLLYSLQMPVMNLYVPGMDKGKALHFLFVKSETKTPGGLAARPVLTSYYKSNHFKNRPFDAYNNYTSPTAAILCADAFQSMYAQMLCGLCQRQDVLRVGAVFASGLLRAIRFLQLNWEQLAEDIEAGSLTPRVTDPSVREAVAGILRADPELAALVRSECSKGDWAGIITRIWPSTKYLDVIVTGAMAQYIPTLKYYSGGLPMACTMYASSECYFGLNLRPMCDPSEVSYTLMPNMCYFEFLPMDSAAASGGDASQLVDLARVEVGREYELVITTYAGLNRYRVGDVLQVTGFHNSAPQFRFVRRKNVLLSIESDKTDEAELQRAVERASALLRPHGAAVVEYTSQAYTKSIPGHYVIYWELLAKGPAGGAAVGEGTLERCCLEMEEALNTVYRQSRVADGSIGPLEIRVVRPGTFEELMDYAISRGASINQYKVPRCVTFPPIIELLDSRVVSSHFSPALPHWTPGQRSDSD

SEQ ID NO: 609 - DNA, 846 bp, Zea mays
aaattgatgagcaatgcttttttataatgccaactttgtaaaaaagcaggcttaaacaatggagctggagcttgggctggcgccgccgagcgcgcgccgtcccacccccatgacgatcgaccagcagcagcagcagcaacgccacctcgccgaggacgagctgagcagcacctcgtcggaccaccacccttgcgctgcgcgctccgggaagagagggttcgcggaagcgttccaggagacggcggccgcggcgacgacgacgacgctgccgctcttcgacgacggctcgtcgtgcggcgggagaagcggcggcggaaagaggccgctggtcgggtggccgcccttgagctccgcgcgcagcagggcgtgcggcggcggcgccgccaagtacgtgaaggtgaagaaggaaggcgacgccatcggcaggaaagtggacctgtcgctccacgcctcctacgacgagctcctcgccacgctcgcccgcatgttcccgaccaacaacggcagccaagacgacaaggaaatcagcagcaagtccaccgccgccgccaccaccaccaccagccatagggacgtggtggtcacctacgaggacggagagggggactggatgctgctcggagatgtgccgtgggatgattttgcaaggtccgtcaaacggctcaagctactgggatgattggagtactgacccagctttcttgtacaaagttggcattataagaaagcattgcttatcaatttgttgcaacgaacaggtcactatcagtcaaaataaaatcattatttgccatccagctgatatcccctatagtgagtcgtattacatggtcatagctgtttcct

SEQ ID NO: 610 - protein, 206 aa, Zea mays
MELELGLAPPSARRPTPMTIDQQQQQQRHLAEDELSSTSSDHHPCAARSGKRGFAEAFQETAAAATTTTLPLFDDGSSCGGRSGGGKRPLVGWPPLSSARSRACGGGAAKYVKVKKEGDAIGRKVDLSLHASYDELLATLARMFPTNNGSQDDKEISSKSTAAATTTTSHRDVVVTYEDGEGDWMLLGDVPWDDFARSVKRLKLLG

SEQ ID NO: 611 - DNA, 841 bp, Zea mays
attgatgagcaatgcttttttataatgccaactttgtacaaaaaagtaggcttaaacaatggagctggagctcgggctcgcgctgccgacccggcaccgccagccgctcgccgccggtctcctcggcggcgaggcgggtgcgcgcgggacgaagagggtgttcggcgaggcgttcgggtccgccaacaaggccacgcttccgctcttcctgcgcgacgacgacgacggcgacagaggcggcggcggtgaccgcgacggcgtcggccagcatgacccaaacaccaagaagacgaagaggctgctggtggggtggccgccggtgaagtgcgcgcgcaggagcggcggcggcggcgggtacgtgaaggtgaggatggaaggggtggccatcgggcggaaggtggacgtgtccctccacggctcgtaccaggacctgctccgcacgctccgccgcatgttcccttcggctacccaacgaggtgcgggtgcgggtgcagatcacgaggaggaggaggaggtggtggtggaagaggtggcctcgcacgagcgccgccgtctgcatcgtccttacgtggtgacctacgaggacggggaaggggactggttgctcgtcggagacgatgtgccgtgggaggtctttgtgaagtcagtgaagcggctcaagatacttgcgcggacagcagcaggcgacggcttagctcactgctagtagcagtacagtgctgctcctgggaccagctttcttgtacaaagttggcattataagaaagcattgcttatcaatttgttgcaacgaacaggtcactatcagtcaaaataaaatcattatttgccatccagctga

SEQ ID NO: 612 - protein, 215 aa, Zea mays
MELELGLALPTRHRQPLAAGLLGGEAGARGTKRVFGEAFGSANKATLPLFLRDDDDGDRGGGGDRDGVGQHDPNTKKTKRLLVGWPPVKCARRSGGGGGYVKVRMEGVAIGRKVDVSLHGSYQDLLRTLRRMFPSATQRGAGAGADHEEEEEVVVEEVASHERRRLHRPYVVTYEDGEGDWLLVGDDVPWEVFVKSVKRLKILARTAAGDGLAHC

SEQ ID NO: 613 - DNA, 849 bp, Zea mays
caacaaattgatgagcaatgcttttttataatgccaactttgtacaaaaaagcaggcttaaacaatggagctggagcttgggctggcgccgccgagcgcgcgccgtcccacccccatgacgatcgaccagcagcagcagcagcaacgccacctcgccgaggacgagctgagcagcacctcgtcggaccaccacccttgcgctgcgcgctccgggaagagagggttcgcggaagcgttccaggagacggcggccgcggcgacgacgacgacgctgccgctcttcgacgacggctcgtcgtgcggcgggagaagcggcggcggaaagaggccgctggtcgggtggccgcccttgagctccgcgcgcagcagggcgtgcggcggcggcgccgccaagtacgtgaaggtgaagaaggaaggcgacgccatcggcaggaaagtggacctgtcgctccacgcctcctacgacgagctcctcgccacgctcgcccgcatgttcccgaccaacaacggcagccaagacgacaaggaaatcagcagcaagtccaccgccgccgccaccaccaccaccagccatagggacgtggtggtcacctacgaggacggagagggggactggatgctgctcggagatgtgccgtgggatgattttgcaaggtccgtcaaacggctcaagctactgggatgattggacccagctttcttgtacaaagttggcattataagaaagcattgcttatcaatttgttgcaacgaacaggtcactatcagtcaaaataaaatcattatttgccatccagctgatatcccctatagtgagtcgtattacatggtcatagctgtttcctggca

SEQ ID NO: 614 - protein, 206 aa, Zea mays; identical to SEQ ID NO: 610

SEQ ID NO: 615 - DNA, 840 bp, Zea mays
tgattttattttgactgatagtgacctgttcgttgcaacaaattgatgagcaatgcttttttataatgccaactttgtacaaaaaagcaggcttaaacaatggagctggagctcgggctcgcgccgccgaacccgcatcagccgctggctgccaccgccgagttcgtcggtctcctcagcagctcggctggctcgtgcgggaacaagagggttctcggtgacgcgttcggggccgccaaggcggccacgcttccgctcttcgtctgcgaggatggcgacggaggcggcggcgaccgcgaccgcgacggcgtcgtcgaccatgaacagcaaagcaacaatgtacccaggaagaagaggctggtggggtggccgccggtgaagtgcgcgcgtagatgtagctgcggcggcgggtacgtgaaggtgaagctggaaggggtgcccatcgggcggaaggtggacgtgtccatccacggctcgtaccaggagctgctccgcacgctcgagagcatgttcccttcgggtaaccaacaagaagacgaggtggtggtctcgcacgagcgccgccgtcgccatccttatgtagtcacctacgaggacggcgaaggggactggttgctcgtcggagatgatgtgccgtgggaggtctttgtcaagtcagtgaagcggctcaagatacttgcgtagccacccagctttcttgtacaaagttggcattataagaaagcattgcttatcaatttgttgcaacgaacaggtcactatcagtcaaaataaaatcattatttgccatccagctgatatcccctatagtgagtcgtattacatggtcatagctgtttc

SEQ ID NO: 616 - protein, 194 aa, Zea mays
MELELGLAPPNPHQPLAATAEFVGLLSSSAGSCGNKRVLGDAFGAAKAATLPLFVCEDGDGGGGDRDRDGVVDHEQQSNNVPRKKRLVGWPPVKCARRCSCGGGYVKVKLEGVPIGRKVDVSIHGSYQELLRTLESMFPSGNQQEDEVVVSHERRRRHPYVVTYEDGEGDWLLVGDDVPWEVFVKSVKRLKILA

SEQ ID NO: 617 - DNA, 900 bp, Zea mays
cctgccttctcttctcccgccttctcctcctcccagcacagcagcagctgtgaccacatcaccacacacacacacatatatacttggtcatcatccagcttccagcagccagctgcccgccgatcaacgtgtaggcggttcaaagggaaatctgctgatggacatggcgcacgagagatcagacgccagcagcgaggaggaggtgatggccggcgagctgcggcgcgggccttggacggtggaggaggacctccagctggtcaactacgtcgacgcgcacggcgagggccgctggaactcgctcgcccgatcagcaggtctgaagcgcactggcaagagctgccgcctccggtggctgaactacctccggcccgacctccggcgcggcaacatcacgccgcaggagcagctgatgatcctggagctgcactcgcgctggggcaaccgctggtccaagatcgcgcagcacctccccgggcgcaccgacaacgagatcaagaactactggcgcacgcgcgtgcagaagcacgccaagcagctcaaatgcgacgtcaacagccagcagttcaaggacgtgatgcgctacctctggatgccccgcctcgtcgagcgcatccaggccgccgcagccaacaataacgccagcggcgcccggggttccgccagctggcgccgccgcggacgacacgccgctctcgtcgtcgtggcagcacggcggcggcgccgacgacgacggcggcctctacgcgtcgccggagctgcccacggacgcctgctggcctcccgcagactgctactactacccagccgccgctgacgctgaccaccagctactgaacaaccccgccgccgccgccgtcttcccggacctgtcaagcaccacggccgggtcgtcctctc

SEQ ID NO: 618 - protein, 219 aa, Zea mays
MDMAHERSDASSEEEVMAGELRRGPWTVEEDLQLVNYVDAHGEGRWNSLARSAGLKRTGKSCRLRWLNYLRPDLRRGNITPQEQLMILELHSRWGNRWSKIAQHLPGRTDNEIKNYWRTRVQKHAKQLKCDVNSQQFKDVMRYLWMPRLVERIQAAAANNNASGARGSASWRRRGRHAALVVVAARRRRRRRRRPLRVAGAAHGRLLASRRLLLLPSRR

SEQ ID NO: 619 - DNA, 867 bp, Zea mays
aattgatgagcaatgcttttttataatgccaactttgtacaaaaaagcaggcttaaacaatggcgtggcgcggcccgctcggagccggagaggaggccctggacagcggcctcgagctcagcctcggcctcccggcctacttcgcccggccttcaggtttggacgccgccagggaggagcccgccgaggcctctgcctacgctatccaggccgccagtgggagcaatgtctccaaggcaagggtcaggccagcgggcgcggcgccggtggtggggtggccgccggtgcggtcgttccggaggaacctggccgcctcctcctccaggccgtcgtcggggaaacacacccgccaggagggcagcgccaaggacggcctgttcgtgaagatcaacatggacggcgtgccgatcgggcgcaaggtggacctcacggcgtacggcggctacgccgacctctccgccgccgtcggcaagctcttccgcggcctgcttgccgctcagagggaccgagcggccacggcgggtggcgaggaggaggaggagggggagggccccgtgatcggcggcgactacacgctggtgtacgaggacgacgagggcgacagggtccttgccggcgacgtcccctgggagatgttcgtggccaccgccaagaggctgcgcgtgctcaagagctccgacgtgccggcctcgtcggtgacgctgggagctgggggcccggagaggtctgcagccgactgctgctgctgaaacgtgacccagctttcttgtacaaagttggcattataagaaagcattgcttatcaatttgttgcaacgaacaggtcactatcagtcaaaataaaatcattatttgccatccagctga

SEQ ID NO: 620 - protein, 229 aa, Zea mays
MAWRGPLGAGEEALDSGLELSLGLPAYFARPSGLDAAREEPAEASAYAIQAASGSNVSKARVRPAGAAPVVGWPPVRSFRRNLAASSSRPSSGKHTRQEGSAKDGLFVKINMDGVPIGRKVDLTAYGGYADLSAAVGKLFRGLLAAQRDRAATAGGEEEEEGEGPVIGGDYTLVYEDDEGDRVLAGDVPWEMFVATAKRLRVLKSSDVPASSVTLGAGGPERSAADCCC

SEQ ID NO: 621 - DNA, 1073 bp, Zea mays
tttgtacaaaaaagcaggcttaaacaatgaagacaacgacgacggcgatgcgctccttgtccgtcgccgtcctcctcctcgtcgccgccgccgcttcagcatccgccgccaaggatcgctgccactcgggcgacaaggcggcgctgctggccatcaaggcggcgctcggcaacccgtaccacttcgcgtcgtggacgcccgacaacccctgctgcgactggtacgacgtggactgcgacgccaccaccggccgcgtcgtcggcctcgccgtgttccaggacgccaacctgacgggcaccatccccgacgccgtcgcgggcctcgtccacctccagaacctcatgctgcaccacctcccgggcatctccgggcccatcccgccggccatcggcaggctctccaacctctccttcctcaccatctcctggacgggcgtctccggccccgtgccgtcgttcctgggcacgctcaccaggctcaaccagctggacctctccttcaacgccctcaccggcgccgtcccggcctcgctcgccgcgctccccagcctttacagcatcgacatcagccgcaaccgcctcacgggctccctaccgccgctgctcttcagcaggctcgataaggcgcagcaggaggcgtacctccggctgtcgcacaacaacctcaccggcagcgttccgcctgagttctccgcggtggccttcgcgcaggtcgacctgtcccgcaacgccttcgccggcgacgcgtcgggcctgttcggcagggcgaagccggtgcagcagatggacctctcgcgcaacgccttcagcttcaacctgtccgccgtggagctgccggagcagctcaactcgctggaccttagccacaacgccatctacggcggcatccccgcgcaggtggtgaacctgaccaacctgcagttgttcaacgtcagctacaaccggctgtgcggcgcggtgcccaccggcggcaacatggcgagcttcgatgcctacagctaccagcacaacaggtgcttgtgtggacctccgcttgctgatccctgcaaatgaacccagctttcttgtacaaag

SEQ ID NO: 622 - protein, 341 aa, Zea mays
MKTTTTAMRSLSVAVLLLVAAAASASAAKDRCHSGDKAALLAIKAALGNPYHFASWTPDNPCCDWYDVDCDATTGRVVGLAVFQDANLTGTIPDAVAGLVHLQNLMLHHLPGISGPIPPAIGRLSNLSFLTISWTGVSGPVPSFLGTLTRLNQLDLSFNALTGAVPASLAALPSLYSIDISRNRLTGSLPPLLFSRLDKAQQEAYLRLSHNNLTGSVPPEFSAVAFAQVDLSRNAFAGDASGLFGRAKPVQQMDLSRNAFSFNLSAVELPEQLNSLDLSHNAIYGGIPAQVVNLTNLQLFNVSYNRLCGAVPTGGNMASFDAYSYQHNRCLCGPPLADPCK

SEQ ID NO: 623 - DNA, 971 bp, Zea mays
caaattgatgagcaatgcttttttataatgccaactttgtacaaaaaagctttgcttaaacaatgttggagctgcggcttgtgcaggggagcctcctcaagaaggtcctggaggcgatccgcgagctggtcaacgacgccaacttcgactgctccggcaccgggttctcgctgcaggccatggactcgagccacgtcgccctcgtcgcgctgctcctacgcgccgaggggttcgagcactaccgctgcgaccgcaacctctccatgggcatgaacctcaacaacatggccaagatgctccggtgcgccggtaacgacgacatcatcaccataaaggccgatgacggttccgacaccgtcaccttcatgttcgagtcgcccaagcaagataagattgcggatttcgagatgaaactgatggatattgatagcgagcacctcggaatcccggattccgagtaccaggccatcgtccgcatgccttcttctgagtttatgaggatctgcaaggatcttagcagcatcggagacactgtcgttatctcggtaaccaaggagggcgtgaagttctccacatctggagaaattgggagtgcgaacattgtttgcaggcagaaccaaactattgacaagccagaagaggctaccattatagagatgcaagagccggtttccctgacttttgccctaaggtacatgaactcgttcacgaaggcgtcttcactgtccgaacaagtcacgatcagcctgtcgtccgagctaccagtggtggtcgagtataagatcgctgagatgggttacattagattttacctggcgccaaagattgaggacgatgaggagatgaagccatgattgccacccagctttcttgtacaaagttggcattataagaaagcattgcttatcaatttgttgcaacgaacaggtcaaaagcagtcaaaataaaatcattatttgccatccagctga

SEQ ID NO: 624 - protein, 263 aa, Zea mays
MLELRLVQGSLLKKVLEAIRELVNDANFDCSGTGFSLQAMDSSHVALVALLLRAEGFEHYRCDRNLSMGMNLNNMAKMLRCAGNDDIITIKADDGSDTVTFMFESPKQDKIADFEMKLMDIDSEHLGIPDSEYQAIVRMPSSEFMRICKDLSSIGDTVVISVTKEGVKFSTSGEIGSANIVCRQNQTIDKPEEATIIEMQEPVSLTFALRYMNSFTKASSLSEQVTISLSSELPVVVEYKIAEMGYIRFYLAPKIEDDEEMKP

SEQ ID NO: 625 - DNA, 1856 bp, Zea mays
tgcctggcagttccctactctcgcgttaacgctagcatggatgttttcccagtcacgacgttgtaaaacgacggccagtcttaagctcgggccccaaataatgattttattttgactgatagtgacctgttcgttgcaacaaattgatgagcaatgcttttttataatgccaactttgtacaaaaaagcaggcttaaacaatgggtgctcgctgctccaagctctccgtctgctggtggcctccccacttcaaatcgccaatgctcgagaatggcgccgccggagatgatggcagcggcgtgccggtgttcgccgagtacagcttcgacgacctccgggtggccaccgacggcttcgcccccgatcgcatcgtgtcggagcacggggagaaggcacccaacgtggtctaccgtggcacgctcttcagctccggccgcaccgtcgccattaagcgcttcggccgctccgcctggccggactcacgccagttcctggaggaggcgagggctgttgggcagctgcgtagtggcaggctggccaatctgatcggttgctgctgcgagagcggcgagcgtctcctcgtcgcagagttcatgccgcacgagaccttggcaaagcatctcttccactgggagacaaatccattgagttgggcaatgaggatgagggctgcgctttatgtggcacaagcgttggactactgcagtagcaaagggagggcactctatcatgacctgcatgcatacagggttgtctttgatgtggatggtaacccaagattatcatgttttggtctgatgaagaacagccgagatggaaagagctacagtactaatttggccttcacgcctcctgaatatcttaagacaggcagagtaagtcctgagagtgtggtttacagttttggcactgtcttgcttgatctcctgagtggaaagcacattccaccaagtcatgcactcgaccttataagaggaaagaactttctagtgctgatggattcttgcttagaaggtcatgtatccaactcggacggaacagacttgatgcgattagcatcccgttgcctgcaatatgaagcacgtgaccgtccaaatctgaaaactgtggtatctggtctcacaagtctccagaaagatgcttatactccttcgcacactttgcttgggattcaacatgataagaacaactcaggtcaagtttccttatctgctattgggaaagcttttgccagagcagacctgaatgaagtgcatgaaatattgctgcatgatggatataatgaggacgacgaggctaatgctgagctatctctccagtcatggaatggtgatatatctgagagctttgttgttaagaggtgtgcagacaatgcctttaggtctaaggaatacacgactgcaatcgagtgttactcaaggttcctggactcaggtgcagtggtggctccaaccatgctgggacggagatgcttcgcacatgtggtggccggcaacccacaggaaggcctcgaggatgcaaagagagccgagattattgcatcggactggccgatgggacactacctgcaggccctggcacttcataagctgggtagggaggctgaaagccaagaagcactgaagaatggcactgccttggaagctgcaaggaatagtagagctagaactgtatagccctgaatttgtgataccacccaacttttctatacaaagttggcattataagaaagcattgcttatcaatttgttgcaacgaacaggtcactatcagtcaaaataaaatcattatttgccatccagctgcagggcggccgcgatatcccctatagtgagtcgtattacatggtcatagct

SEQ ID NO: 626 - protein, 491 aa, Zea mays
MGARCSKLSVCWWPPHFKSPMLENGAAGDDGSGVPVFAEYSFDDLRVATDGFAPDRIVSEHGEKAPNVVYRGTLFSSGRTVAIKRFGRSAWPDSRQFLEEARAVGQLRSGRLANLIGCCCESGERLLVAEFMPHETLAKHLFHWETNPLSWAMRMRAALYVAQALDYCSSKGRALYHDLHAYRVVFDVDGNPRLSCFGLMKNSRDGKSYSTNLAFTPPEYLKTGRVSPESVVYSFGTVLLDLLSGKHIPPSHALDLIRGKNFLVLMDSCLEGHVSNSDGTDLMRLASRCLQYEARDRPNLKTVVSGLTSLQKDAYTPSHTLLGIQHDKNNSGQVSLSAIGKAFARADLNEVHEILLHDGYNEDDEANAELSLQSWNGDISESFVVKRCADNAFRSKEYTTAIECYSRFLDSGAVVAPTMLGRRCFAHVVAGNPQEGLEDAKRAEIIASDWPMGHYLQALALHKLGREAESQEALKNGTALEAARNSRARTV

SEQ ID NO: 627 - DNA, 1555 bp, Zea mays
aaacgctttccctttcttctccgttccatcgcctcctcccacttctctctgccgccccccacaccccagccgcgccattgcccactgcattgcagactgtaagccgggaatccacttggattggatcaatccatcggaaggcgccagatgaacgggcggctgtcggccgagtaccgggggctggaggtgaaggtgccgaacctcttccggtgccccatctcgctggacgtgatgcactcccccgtgagcctctgcaccggcgtcacctacgagcgcgcctccatccagcgctggctcgactccggcaacaccacctgcccggccaccatgctcacgctcccctccaccgacctcgtccctaacctcaccctgcgccgcctcatcgcgctctgggcgtccacggccgcgccctcctcctcgtcgcccgccgcgtccgccgtcgggcccacgccggccgcggccgcggccgagctcctccgccggatcgctgaccccggcgcggacccctgccccccgctccggaagctcgcggctttcctctccgacgacgacgtggacgagttcgacaagaacgcgctggcgagggccggcggtgccgccgagaccgtggcgtttgtgctgcggagggcggacagggaggccgcggaggccgccgtgcgcgtgctcgcggcgatcgcggcgtccgactgcatcgaggaggagagcaagaggcgcgtggccgctgcgctcgccgccgacgcgccgtccgcggccgcgtccctggcgcgcgtgctgcggagcgggacctcgctggaggcgcgcgtcgacgcggcgaggctggtggagtcgctgctccgcaatgcggcaccgggggcgcgggccgcggtggcggagtccgaggacctggtccgcgaactggtccgcctcgtgggccccgcggacgagaagaagggcagcctggacgggcaggccgtggcggcgggaatgtcgtgcctagcggccgtcgcggcgacgcggcgtgcccgcgctgcgatggttcggctgggcgccgtggccgccgcggtgcgcgtcctggaagccgacgccgggcccccgggccaggcgctccgcgtgctggaggccacagtggggtgcgccgagggccgcgccgcggtgtgcgagtccgccctgtcggtggtgcccgcggtggtgtccaagatgatgaaggctggggtgggcggcgcggaggcggcggtgtcggtgctctgggcggtgtgccaccggtaccgggaccggcgcgcggtggaggcggcggcggcgtgcgagggcgggctcaccaagctgctgctgctgatgcagagcgggtgctcggcggctgcgcggcagatggcgtcggagctgctcaagatcttcagggtgaacggcaagagctgcgtcgcggggtacgactccaagactagccacatcatgcccttctgatcctcactgctatcggtgatacaacagtggaaccagcatttgtctgttacccttttccagtttcgaatttttttgattcgttggaagtgcatacagtaggcaaaaaaaaaaaaaaaaa

SEQ ID NO: 628 - protein, 429 aa, Zea mays
MNGRLSAEYRGLEVKVPNLFRCPISLDVMHSPVSLCTGVTYERASIQRWLDSGNTTCPATMLTLPSTDLVPNLTLRRLIALWASTAAPSSSSPAASAVGPTPAAAAAELLRRIADPGADPCPPLRKLAAFLSDDDVDEFDKNALARAGGAAETVAFVLRRADREAAEAAVRVLAAIAASDCIEEESKRRVAAALAADAPSAAASLARVLRSGTSLEARVDAARLVESLLRNAAPGARAAVAESEDLVRELVRLVGPADEKKGSLDGQAVAAGMSCLAAVAATRRARAAMVRLGAVAAAVRVLEADAGPPGQALRVLEATVGCAEGRAAVCESALSVVPAVVSKMMKAGVGGAEAAVSVLWAVCHRYRDRRAVEAAAACEGGLTKLLLLMQSGCSAAARQMASELLKIFRVNGKSCVAGYDSKTSHIMPF

SEQ ID NO: 629 - DNA, 1263 bp, Zea mays
atggtgggctccggcgcggatgggggcggcggaggggatgacgcgcggagcaaagaggccgcggggatgatggcgctccacgaggccctccgcaacgtctgcctcgactcggactggacctactccgtcttctggaccatccgtcctcgcccgcgctgccgcggcggcaacgggtgcatggtcggcgacgacaacggcagcctgatgctgatgtgggaggacggcttctgccggccacgggtggcggagtgcctggcggacatgagcggcggcgaggacccggtgcggaaggccttcatcaagatgtccatccaactctacaactacggagaagggctgatgggaaaggtggcctctgataaatgtcacaaatgggtcttcaaggaaccttctgaatgcgagcccaacatctccaactactggcagagctccttcgacgcaaccatagctgtgatccaagccgggcatggcctcctgcagctgggctcttgcaagattatacccgaggacctgcacttcgtgctgcggatgcgacacacgttcgagtcgctgggctaccagtcgggcttcttcctctcccagctcttctcgtcggcgcggggcgcctcgccgacgccgcctcctccggccgcgcgtcccccgccggcgcagcttttcaactggccgggcgcccaccagccgcagctcttcccgcccggtccgggcgcgttccaccacccgtcggcgcgggcgatgccgccattgttcccaggcggcggcaaggacgagggccacatgttccacattccaccggcacaccatggcagcaagccactgcacatggacgagctccagcaccggcaccagcagacgatgggggccggtggcgaggcgcccgacggtgaactccggtggcccaacgggctgtccttcttcaccgcgctcaccgggcgagacgacgacgcgaagctgctattcggtggccccggcgccgcggacgacgagaaggcggcgccggacgcgcagaccgggcacggcggggctgggaacgtggaggagtacctgagcctggagagccactcggacaaggcgccgagcaaggtggagaacggcgcccagcacagcaccaagtccaagaggagcttcacgttgcccgcgcgggtgagctcgtccacgaccacgtccccgtccgtgtcggcctccacggcgccgcaagggatggagtaccgagggacgcacgagggcggcgtctactcggacctcatggagacgttcttggagtag

SEQ ID NO: 630 - protein, 420 aa, Zea mays
MVGSGADGGGGGDDARSKEAAGMMALHEALRNVCLDSDWTYSVFWTIRPRPRCRGGNGCMVGDDNGSLMLMWEDGFCRPRVAECLADMSGGEDPVRKAFIKMSIQLYNYGEGLMGKVASDKCHKWVFKEPSECEPNISNYWQSSFDATIAVIQAGHGLLQLGSCKIIPEDLHFVLRMRHTFESLGYQSGFFLSQLFSSARGASPTPPPPAARPPPAQLFNWPGAHQPQLFPPGPGAFHHPSARAMPPLFPGGGKDEGHMFHIPPAHHGSKPLHMDELQHRHQQTMGAGGEAPDGELRWPNGLSFFTALTGRDDDAKLLFGGPGAADDEKAAPDAQTGHGGAGNVEEYLSLESHSDKAPSKVENGAQHSTKSKRSFTLPARVSSSTTTSPSVSASTAPQGMEYRGTHEGGVYSDLMETFLE

SEQ ID NO: 631 - DNA, 994 bp, Zea mays
aattgatgagcaatgcttttttataatgccaactttgtacaaaaaagcaggcttaaacaatggacaagtactgggaggagacgcagcgctacctggagtacgaggagctcagcatctacttggaggcgcaggaggacgccatgtcttgctacgactccagctcgccggacggctccatctcccactcgtcgtcgtcggcggcggcgtgcggcaacaagaacatcctgatggagcgcgaccgccgccgcaagctcaacgacaagctctacgcgctccgcagcgtcgtgccgaacatcaccaagatggacaaggcgtcgatcatcaaggacgccatcgagtacatccagcagctgcaggtggaggagcggcgggtgctgcaggagctgcgcgtgctcgacgacgacaccgccgccgccgccaccgcgcaggtggagtgctgcgacgtcgacgggggcctgctgcgacgggaagccgagcgcgcgaagaagatgaagcgcgcgcagtccgtcgccagcggcgcgcagtctgctccgcctccgcccccgccgccgcacgtcgaggtgctggagctgcgcgtgtcggaggtgggcgaccacgtgctggtggtcagcgtgacgtgccgcaagcgacgcgacgccatggccagggtgtgccgcgccatcgaggacctccggctccgtgtcatcactgccaacgtcacctccgtcgccggctgccacgtgcacaccgtcttcgtcgaggtagataaaatcgaccacatccaagtgaagaacatgattgaggctgctctcacgttgctcgacgcccccggaagcccccacagctcgatgagctattacgagacctaactatgttgagcaatgcttttcggacgtctactagacccagctttcttgtacaaagttggcattataagaaagcattgcttatcaatttgttgcaacgaacaggtcactatcagtcaaaataaaatcattatttgccatccagctga

SEQ ID NO: 632 - protein, 262 aa, Zea mays
MDKYWEETQRYLEYEELSIYLEAQEDAMSCYDSSSPDGSISHSSSSAAACGNKNILMERDRRRKLNDKLYALRSVVPNITKMDKASIIKDAIEYIQQLQVEERRVLQELRVLDDDTAAAATAQVECCDVDGGLLRREAERAKKMKRAQSVASGAQSAPPPPPPPHVEVLELRVSEVGDHVLVVSVTCRKRRDAMARVCRAIEDLRLRVITANVTSVAGCHVHTVFVEVDKIDHIQVKNMIEAALTLLDAPGSPHSSMSYYET

SEQ ID NO: 633 - DNA, 2026 bp, Zea mays
aaaaccaccgagcatcaaaccctaggcgaacccgaaccaggaacaccgccaacgggtggtggagctccgcgtcgaccgcgcttctccagccatggctgaacccgagatggaggtggccgtagcgacagcagcaccagccggtcagaagagagagagggaggaaggaggcgatcctgctgctgaatgcggcggcgaggagacggaggtggaaggggcggcggcgaagaagccgaagttggaggaggccaaggaggcggagaaggggagggtagaggagacggcggaggggaagacacaggaggcaaatgaggagaaggcagtggaggcggaggacaagcctgtgacagaggaggcaaatgagaagaaggcagttgaagcggagggaaagcctgtgacacaggaggcaaatgaggagaaggcagcggaggcggagggcaagcctgtgaagctggggcctaaagaattcgcctcggccatcgatatgttcaactacttctacgctctgctccactcctggacgccgcagcttgagttcaataagtatgaacaaatggtgctggaggatttgctgaggaaaggtcatgctgaacctgctaagaagattggggcaggagtcgaagcatttgagataggcaaccacccggtgtggaaaagtcactgcttctttgtgcgcaggactgatggatctgtggatgacttcagcttccgcaaatgtgtggacaacatactgcccctccctgaggactttaagatcggcaatggcaagaagtctggtggccaccaaaaggatggcggtggagggcgggcaggaggacgccgtggaggaggccgaggcggctggcgtggtggacggggccggggcaggaggggagggtgcctatgccgctatggtatggctacgctacgctacgccgacataattgcgtacgtcattattttggtttttgtttttcctttgaaagaactagccatgcatgtggctgcgagaaggtgccctatttcttcaccgtcgtccgccaagaagggatcctgcatgcaacaggcgtgggatgtgatgactggcggtgaagaattggtgatgggccttgaggaaaaaaaaaaccaacatgctcacatgatctctgcgaggaacggagatgacgccggggcacgccctctcgagcgtcgtcttcacgtcgttgatgaagtcgtagccgaagatgccactgttctccaccgccgtcttctccggcaaggccccacgcacgcccgcaaggacgtccacctggcctccttgcgcgccaggctcgcgcagcagggcaaggccggcgtggcgctgcgcctgctcctcgccgccgcgctcgctggcttcctccttgtcttcgccgcgcgcaccctggtcacgtcgcctgtcccgtcatcgccctcgtgcttgttggagccgcagccgctggtgcactacgccacgtccaacgcgacgccgcagcagacggcggaggagatcagggtggcgctgcgcgtgctgcagcgccgcacgccctgcaacttcctggtgttcgggctgggcctcgacagccccatgtgggcggcgctgaaccacggggggcggaccgtgttcctggaggaggacgcggcgtggatcggtagcgtgcggggcaggcacccggcgctggagtcccaccacgtggcctacgacacggcgctggccgacgccgacgcgctgctggggctccgcacccacccggcctgcgtcgcgcagcccgaccgaagaggcgtgaggcgagagaggcgagagccgcggcgcgtctgcgagtgaactcgagaggcgagtgaaccctagcgcagtgggcgagcacgggccaggctgatgcgcgaaggaagttacctgcgtttcaattgggcctggccacgaagtcagatgtggctcgcctcagctagacccccaagctgggccaggataccaaacatggcgtgcttgtttcaaatggacctggtcgtgcgctgggccagccaaccaaacatatccatagtcacgcaccggactacc

SEQ ID NO: 634 - protein, 567 aa, Zea mays
MAEPEMEVAVATAAPAGQKREREEGGDPAAECGGEETEVEGAAAKKPKLEEAKEAEKGRVEETAEGKTQEANEEKAVEAEDKPVTEEANEKKAVEAEGKPVTQEANEEKAAEAEGKPVKLGPKEFASAIDMFNYFYALLHSWTPQLEFNKYEQMVLEDLLRKGHAEPAKKIGAGVEAFEIGNHPVWKSHCFFVRRTDGSVDDFSFRKCVDNILPLPEDFKIGNGKKSGGHQKDGGGGRAGGRRGGGRGGWRGGRGRGRRGGCLCRYGMATLRYADIIAYVIILVFVFPLKELAMHVAARRCPISSPSSAKKGSCMQQAWDVMTGGEELVMGLEEKKNQHAHMISARNGDDAGARPLERRLHVVDEVVAEDATVLHRRLLRQGPTHARKDVHLASLRARLAQQGKAGVALRLLLAAALAGFLLVFAARTLVTSPVPSSPSCLLEPQPLVHYATSNATPQQTAEEIRVALRVLQRRTPCNFLVFGLGLDSPMWAALNHGGRTVFLEEDAAWIGSVRGRHPALESHHVAYDTALADADALLGLRTHPACVAQPDRRGVRRERREPRRVCE

SEQ ID NO: 635 - DNA, 1411 bp, Zea mays
tttgtacaaaaaagcaggcttaaacaatgggcttcttggcgtgcttttgccgatgccctcaggacggggacgacgacgagaaggagggggagcagttcagaatcaaccaccaggtcgcctcagtggactacccaaaatcttctgaaagcagcccattgaaggctgagagagtggttcatatggacggagcccagctaattggtagacatgatgaagcaacaatcttcacgttgcgtcagcttgctgaggctaccaataattttaggcaggactctcttttggggcgagggggattcggttgcgtctacaaggcaactcttagtaatggacaggttgttgcagtcaaacaacttgatctaaatgggcttcaagggaacagagaattcctcgtggaggttctcatgctcaacctcctgcatcaccctaatcttgtcaatctgcatgggtactgtgttgatggcgatcaacgcttgctcgtttatgagtatatgccattgggatcactagaagatcatctacatgatcttgcacctaatcaacaacctctagattggaaaacacggatgaagatagctgctggtgcagcggctggtttggaatacctccatgataaggcaaatcctccagttatttaccgagacattaaaccatcaaacattctccttggcgaaggctatcatgcaaaattgtccgactttggacttgctaagcttggtcctgtaggcgacaagactcatgtgacaacacgcgtcatggggacacatggttattgtgctcctgaatatgccttaactggacagctgacagtgaagtctgacatctatagttttggcgtcgttttccttgagctaattacaggtcgaagaccacaagacagtgatcggcctcctgaggaacaagacctagttgcatgggctcgtccattgttcaaagaccaaaagaagtttcgcaagatggctgatccttcgttgtgtggccgcttcccaaagaggggtttattccaggcactggctattgcagcaatgtgtttgcaggagaaggcaaaaagccgacctcccatgagggaagttgccgcagctctctcttatttagcatcacaagcatacgacaggaacaacaacgctgctgctcatcgtaatcgtgccgggccttcaacaccgagagttctggacgaccagattggccaggacacctgcacattggctagtcaacagggagctcagatgtccatgcatgtcgggacagaccacgccacgcctgaagtgaaggaagcttcctggagtggttcacatcgtggaggacggggcagggttactccgaatggcgctgacagggagcgtgcacttgcagatgccaacgtgtgggccgaggcttggaggcgccaggagaaggcaagcaagatgcgatagcg

SEQ ID NO: 636 - protein, 460 aa, Zea mays
MGFLACFCRCPQDGDDDEKEGEQFRINHQVASVDYPKSSESSPLKAERVVHMDGAQLIGRHDEATIFTLRQLAEATNNFRQDSLLGRGGFGCVYKATLSNGQVVAVKQLDLNGLQGNREFLVEVLMLNLLHHPNLVNLHGYCVDGDQRLLVYEYMPLGSLEDHLHDLAPNQQPLDWKTRMKIAAGAAAGLEYLHDKANPPVIYRDIKPSNILLGEGYHAKLSDFGLAKLGPVGDKTHVTTRVMGTHGYCAPEYALTGQLTVKSDIYSFGVVFLELITGRRPQDSDRPPEEQDLVAWARPLFKDQKKFRKMADPSLCGRFPKRGLFQALAIAAMCLQEKAKSRPPMREVAAALSYLASQAYDRNNNAAAHRNRAGPSTPRVLDDQIGQDTCTLASQQGAQMSMHVGTDHATPEVKEASWSGSHRGGRGRVTPNGADRERALADANVWAEAWRRQEKASKMR

SEQ ID NO: 637 - DNA, 875 bp, Zea mays
attgatgagcaatgcttttttataatgccaactttgtacaaaacacttagcttaaacaatggcggcagtcggagcgcacccagtgctgtaccaccacccggcgccggcgggcgacgcctcctccatgtcctcctacttctcccacggaggcagctccaccacctccagctctgcgtccagcttcaccgccgcgctcgcgccgacgacgacggcgctcgccgagcatttcgacatctccgagttcctcttcgacgacgctgcgggcgccggggtcgccggcgcgccaggtgtgttcgccgatggcgcggcccgccccgtcgtcctgccggtgccggatgccgctggtggtggtgcaattatcggcgcagccgctgggggcgcggctgcggcgtcggaggtgccagagcggccgcggacgacgcggatcgcgttccggacgaggtcggagatcgagatcctggacgacggctacaagtggaggaagtacggcaagaagtccgtcaagaacagccccaacccaaggaactactaccggtgctcgacggaagggtgcaacgtgaagaagcgggtggagcgggacaaggacgaccccagctacgtggtgacgacgtacgaggggatgcacaaccacgtcagccccagtacggtgtactacgccagccaggacgccgcctccggccgcttcttcgtcgccggcacgcagccaccgggctccctcaactgaacccagctttcttgtacaaagttggcattataagaaagcattgcttatcaatttgttgcaacgaacaggtcactatcagtcaaaataaaatcattatttgccatccagctgatatcccctatagtgagtcgtattacatggtcatagctgt

SEQ ID NO: 638 - protein, 221 aa, Zea mays
MAAVGAHPVLYHHPAPAGDASSMSSYFSHGGSSTTSSSASSFTAALAPTTTALAEHFDISEFLFDDAAGAGVAGAPGVFADGAARPVVLPVPDAAGGGAIIGAAAGGAAAASEVPERPRTTRIAFRTRSEIEILDDGYKWRKYGKKSVKNSPNPRNYYRCSTEGCNVKKRVERDKDDPSYVVTTYEGMHNHVSPSTVYYASQDAASGRFFVAGTQPPGSLN

SEQ ID NO: 639 - DNA, 1216 bp, Zea mays
acaaattgatgagcaatgcttttttataatgccaactttgtacaaaaaagcaggcttaaacaatggacccgtggatcgggcagccttccctgagcctggacctcaacgtcggccttccgacggcggcgaggccgcctgcgaccaccaccaccgccgaggtcttggtcgaggaggacttcctggccgtcaagaaagaccgagaggtgcaggtgcaggcgctcgaggcggagctccggcgagccggcgaggagaacaggcgcctcagcgacatgctccgggcggtggtggccaagtacgcggagctgcagggccaggtcaacggcatggcggcgccggtggtgtccacggcgggcaacagcgccgccgccgccgccgccaaccgccagtcctccgcgtcgtccgacgacggcggctccgcggccggctcgccgtccaggaagcggccggtccggagcgacagcctcgacaccgcgccccagcatcacaaccgcaagccgccgtcgccgtacgcggccgcccccgcccccggccccgaccagatggagtgcacgtcggccgccgtcaccatcgtcgcagccgccgccgcctaccaccacgagccggccaggcgcatccgggaggcggagcgcaagcccaaggtgtcccggcgattcgtccacgccgacccctctgacctcagcctcgtggtgaaggacgggtaccagtggcgcaagtacgggcagaaggtgaccaaggacaacccgtgcccgcgcgcctacttccggtgctcgctcgcgccgtcgtgcccggtgaagaagaaggtgcagcgcagcgcggacgacagcgccgtcctggtggccacgtacgagggcgagcacaaccacgcccgcccgccgcagcacgacggcggcgccaagaggtcgtccgcgccgccggcgggcgaggccgcgcgaccgccggcgccactgccgctgcagaagcaagaggccgggccgtcgtcggaggtcgcgaggaagaacctcgcggagcacatggcggtcacgctcacgcgggatcccgggttcaaggcggcgctagtcagcgcgctctccggccggatccttgaccagggattatagacccagctttcttgtacaaagttggcattataagaaagcattgcttatcaatttgttgcaacgaacaggtcactatcagtcaaaataaaatcattatttgccatccagctgatatcccc

SEQ ID NO: 640 - protein, 344 aa, Zea mays
MDPWIGQPSLSLDLNVGLPTAARPPATTTTAEVLVEEDFLAVKKDREVQVQALEAELRRAGEENRRLSDMLRAVVAKYAELQGQVNGMAAPVVSTAGNSAAAAAANRQSSASSDDGGSAAGSPSRKRPVRSDSLDTAPQHHNRKPPSPYAAAPAPGPDQMECTSAAVTIVAAAAAYHHEPARRIREAERKPKVSRRFVHADPSDLSLVVKDGYQWRKYGQKVTKDNPCPRAYFRCSLAPSCPVKKKVQRSADDSAVLVATYEGEHNHARPPQHDGGAKRSSAPPAGEAARPPAPLPLQKQEAGPSSEVARKNLAEHMAVTLTRDPGFKAALVSALSGRILDQGL

SEQ ID NO: 641 - DNA, 585 bp, Arabidopsis thaliana
atgaatatctctcaaaaccctagccctaattttacgtacttctccgatgaaaactttattaatccgtttatggataacaacgatttctcaaatttgatgttctttgacatagatgaaggaggtaacaatggattaatcgaggaagagatctcatctccgacaagcatcgtttcgtcggagacatttaccggggaaagcggcggatccggcagcgcaacaacgttgagtaaaaaggaatcaactaatagaggaagtaaagagagtgatcagacgaaggagacgggtcatcgagttgcatttagaacgagatcgaagattgatgtgatggatgatggttttaaatggaggaagtatggcaagaaatctgtcaaaaacaacattaacaagaggaattactacaaatgctcaagtgaaggttgctcggtgaagaagagggtagagagagatggtgacgatgcagcttatgtaattacaacatatgaaggagtccataaccatgagagtctctctaatgtctattacaatgaaatggttttatcttatgatcatgataactggaaccaacactctcttcttcgatcttaa

SEQ ID NO: 642 - protein, 194 aa, Arabidopsis thaliana
MNISQNPSPNFTYFSDENFINPFMDNNDFSNLMFFDIDEGGNNGLIEEEISSPTSIVSSETFTGESGGSGSATTLSKKESTNRGSKESDQTKETGHRVAFRTRSKIDVMDDGFKWRKYGKKSVKNNINKRNYYKCSSEGCSVKKRVERDGDDAAYVITTYEGVHNHESLSNVYYNEMVLSYDHDNWNQHSLLRS

SEQ ID NO: 643 - DNA, 2194 bp, Oryza sativa
aatccgaaaagtttctgcaccgttttcaccccctaactaacaatatagggaacgtgtgctaaatataaaatgagaccttatatatgtagcgctgataactagaactatgcaagaaaaactcatccacctactttagtggcaatcgggctaaataaaaaagagtcgctacactagtttcgttttccttagtaattaagtgggaaaatgaaatcattattgcttagaatatacgttcacatctctgtcatgaagttaaattattcgaggtagccataattgtcatcaaactcttcttgaataaaaaaatctttctagctgaactcaatgggtaaagagagagattttttttaaaaaaatagaatgaagatattctgaacgtattggcaaagatttaaacatataattatataattttatagtttgtgcattcgtcatatcgcacatcattaaggacatgtcttactccatcccaatttttatttagtaattaaagacaattgacttatttttattatttatcttttttcgattagatgcaaggtacttacgcacacactttgtgctcatgtgcatgtgtgagtgcacctcctcaatacacgttcaactagcaacacatctctaatatcactcgcctatttaatacatttaggtagcaatatctgaattcaagcactccaccatcaccagaccacttttaataatatctaaaatacaaaaaataattttacagaatagcatgaaaagtatgaaacgaactatttaggtttttcacatacaaaaaaaaaaagaattttgctcgtgcgcgagcgccaatctcccatattgggcacacaggcaacaacagagtggctgcccacagaacaacccacaaaaaacgatgatctaacggaggacagcaagtccgcaacaaccttttaacagcaggctttgcggccaggagagaggaggagaggcaaagaaaaccaagcatcctccttctcccatctataaattcctccccccttttcccctctctatataggaggcatccaagccaagaagagggagagcaccaaggacacgcgactagcagaagccgagcgaccgccttctcgatccatatcttccggtcgagttcttggtcgatctcttccctcctccacctcctcctcacagggtatgtgcctcccttcggttgttcttggatttattgttctaggttgtgtagtacgggcgttgatgttaggaaaggggatctgtatctgtgatgattcctgttcttggatttgggatagaggggttcttgatgttgcatgttatcggttcggtttgattagtagtatggttttcaatcgtctggagagctctatggaaatgaaatggtttagggatcggaatcttgcgattttgtgagtaccttttgtttgaggtaaaatcagagcaccggtgattttgcttggtgtaataaagtacggttgtttggtcctcgattctggtagtgatgcttctcgatttgacgaagctatcctttgtttattccctattgaacaaaaataatccaactttgaagacggtcccgttgatgagattgaatgattgattcttaagcctgtccaaaatttcgcagctggcttgtttagatacagtagtccccatcacgaaattcatggaaacagttataatcctcaggaacaggggattccctgttcttccgatttgctttagtcccagaattttttttcccaaatatcttaaaaagtcactttctggttcagttcaatgaattgattgctacaaataatgcttttatagcgttatcctagctgtagttcagttaataggtaatacccctatagtttagtcaggagaagaacttatccgatttctgatctccatttttaattatatgaaatgaactgtagcataagcagtattcatttggattattttttttattagctctcaccccttcattattctgagctgaaagtctggcatgaactgtcctcaattttgttttcaaattcacatcgattatctatgcattatcctcttgtatctacctgtagaagtttctttttggttattccttgactgcttgattacagaaagaaatttatgaagctgtaatcgggatagttatactgcttgttcttatgattcatttcctttgtgcagttcttggtgtagcttgccactttcaccagcaaagttc

SEQ ID NO: 644 - DNA, 351 bp, Cauliflower Mosaic Virus
tgagacttttcaacaaagggtaatatccggaaacctcctcggattccattgcccagctatctgtcactttattgtgaagatagtggaaaaggaaggtggctcctacaaatgccatcattgcgataaaggaaaggccatcgttgaagatgcctctgccgacagtggtcccaaagatggacccccacccacgaggagcatcgtggaaaaagaagacgttccaaccacgtcttcaaagcaagtggattgatgtgatatctccactgacgtaagggatgacgcacaatcccactatccttcgcaagacccttcctctatataaggaagttcatttcatttggagaggacacgctg

1. A method for the production of a transgenic plant having enhanced yield relative to a control plant, comprising introduction and expression in a plant cell or plant a nucleic acid encoding a GRP polypeptide listed in Table A or a homologue thereof.

2. The method according to claim 1, wherein said nucleic acid encoding a GRP polypeptide
(i) encodes the GRP polypeptide represented by SEQ ID NO: 626, or
(ii) encodes a homologue of SEQ NO: 626 having at least 75% overall sequence identity to SEQ ID NO: 626, or
is a nucleic acid hybridising to a nucleic acid encoding the polypeptide of (i) or (ii);

3. The method of claim 1, further comprising cultivating said plant cell or plant under conditions promoting plant growth and development.

4. The method of claim 3, further comprising selecting a plant with enhanced yield relative to a control plant.

5. The method according to claim 1, wherein said increased yield comprises increased seed yield and/or increased biomass.

6. The method according to claim 5, wherein said increased seed yield comprises at least one parameter selected from the group comprising increased total seed weight, increased seed size, increased harvest index, increased fill rate, and increased number of filled seeds.

7. The method according to claim 5, wherein said increased biomass is root biomass.

8. The method according to claim 1, wherein said nucleic acid is operably linked to a constitutive promoter,

9. The method according to claim 8, wherein said constitutive promoter is a constitutive promoter of medium strength or a GOS2 promoter.

10. The method according to claim 8, wherein said constitutive promoter is a CaMV-35S promoter.

11. A plant, or part thereof, or plant cell, obtainable by the method according to claim 1, wherein said plant, plant part or plant cell comprises a recombinant nucleic acid encoding said GRP polypeptide.

12. The method according to claim 1, wherein said increased yield is obtained under non-stress conditions.

13. The method according to claim 1, wherein said increased yield is obtained under drought stress conditions.

14. A construct comprising:
(i) a nucleic acid sequence encoding a GRP polypeptide as defined in claim 1,
(ii) one or more control sequences capable of driving expression of the nucleic acid sequence of (i); and optionally
(iii) a transcription termination sequence.

15. The construct of claim 14, wherein said one or more control sequences is a constitutive promoter of medium strength or a GOS2 promoter.

16. The construct of claim 14, wherein said one or more control sequences is a CaMV-35S promoter.

17. A method for making a plant having enhanced yield relative to a control plant, comprising introducing the construct of claim 14 into a plant or plant cell.

18. A plant, plant part or plant cell transformed with the construct according to claim 14.

19. The construct according to claim 14, comprised in a plant cell.

20. A transgenic plant having enhanced yield relative to a control plant, resulting from introduction and expression of a recombinant nucleic acid encoding a GRP polypeptide as defined in claim 1 in said plant, or a transgenic plant cell derived from said transgenic plant.

21. Transgenic plant according to claim 11, or a transgenic plant cell derived therefrom, wherein said plant is a crop plant, a monocotyledonous plant or it cereal, or wherein said plant is beet, sugarbeet, or alfalfa, sugarcane, rice, maize, wheat, barley, millet, rye, triticale, sorghum, emmer, spelt, einkorn, teff, milo or oats.

22. Harvestable parts of the transgenic plant according to claim 20, wherein said halvestable parts are shoot biomass and/or root biomass and/or seeds.

23. Products derived from the plant according to claim 20 and/or from harvestable parts of said plant.

24. (canceled)
